United States Patent Application Publication US 2022/0256795 A1 - sequence listing, part 2

SEQ ID NO: 1 - DNA, 3814980 bp, Glycine canescens (residues 1,907,491-3,814,980 of 3,814,980)
gattaaatatactgataatgtctaatttatctaaaattagcttttacaccatcattatttataactaattatgattcaattgttagattgacaaaaattacatttagtagaaactattcattgctgttcatgcatcatgctacctgtaaatggggagattgtgaatttgtaaataggcccttgtggagtggtaatggtatgagctaatcttaaccattggataatggcttgaggttacatgatttcctaaaataaatacattactttgtcattaaatccctatcctgctgtctgaaatgttgaagatttagtctgactcataatagcccaatgctttctgtggagatgctattaccatgtaacccattcccacatgcatacctttctttttgggtttctgatttgtagaattcaacagggtagtgcagctgatgttgccatgtgtgctatgttgcaaatttccaagaataaacggttgaaggagcttgggtggaagttacttcttcaggtaatttagtgccccctaaatttcctttttttgtaaaaaaaataattctttctcgcttttattgtagtgtgtctgcaaattacaccttatctcacttgccattattctagagtcttgaatcaacaagcaattctatccattcttcctccctaagttgggagggggattggaggaatataagcattaatacgcaaacaagagcttggctgactcatattctataagcttactatgtaatcaataatttatgcatctgtcttctcaaaacattttctatggatcattggagaaattaagtgatgcctatgtagtccatcctttttttcttcttcttttcctgttgattattaatgacattatcttggttgtagttcttgttatcaaccaatgtaattgcagttacattacaacttgttccattggtgaattattccaccacaagaagtagttcgttttgccaactttttgaggcaatttccttaatctaaaagcaattaaacgatattagtaaccatatagttacaatttctatcaaccattatttttaatcagtatgttctgatattgaggttatttcaaatctgaatgtgttcagatatctattccaatcttgctgctttttcactaagattcttggatatgtcaaagcaggttcatgatgaagtcatattggaaggaccaacagaatcagctgaggttgcgaagtccatagttgttgagtgcatgtccaaacccttcaacggcaagaacattcttaaagttgacctctctgttgatgccaagtgtgctcaaaactggtactctgggaaatagtggtagactggtagtcccttatacagcatgaaaagccatgacaactgtttggagattttttctcattcagatatctttggctgcatggttcctttggtaattgcaatcaaaagatactgctactctggtgcctctattttcaaggcagaattggtatgccttaaatatcattatctgaggttgatttctatagaggtttttgacatcctaggaaattttccagtgttatgttttgataatataccaaagcataacacgttttgctttgaaggaagaaaaaggccaaaaccactggcctcggcgttttacttctctagttagcagttttttttgtttgtttgttttttttttgttttttttttgttttttttgcttctatattttgaatgtataccggtttttcatgccttgcatcatgtaccggtttgttgttttctcacttttctgaagatgcaaactatatcaatattgtatataaattattataaaaagaatctatctgcatttctgttgatctgttgcaaacatatacttctttgtagaaacatcatgcaatgataattggacgctcaaatagcactttgcatgcacaaatgatcagtatagccagtgacaattaaggttgacaactttcagtaatatcaagcagaattatgaatttatgatattctgtacaaatgaatttatgaatcttatgaacgagcgcaaaaatggcatacaagaatggaccatggacctactttaaccgttatgcatgcctggcaggagctaattaccttattattctttgatgaaaagtttgtcatttgatcatcatatataaaatctatgtagtgcaaactacgtaattgtcctctatttttgtgaaagagtaaactttcacttcccattccagtattttttatttatttacattttacatatcgtaagtgggttctattattaaacataattcatttttatttttcacaaactttcactttttcttgagtttaaataaaaaaaaatttaataataaataccattgaattaagaaagttaatgctagttaaaggcattccagtttccacccactatttttatgttcatgattaaaattattttcttcgtactgaattatgaatatttttggtggggaaaactaattttggcacacctaccacaatgatgtgaatcaaatcaaagcagtggacgtgcactccataatgagacgaggaaagtgtgtcaaaatgctggttggatatgacgttcttgaagaccttatgacacattgtattaagtatatttattgcgagaggaattttgtggagagttcaaaagtaaatttcaactgcataattatatataaatgaaaagttttttaaagtcataattactgaaattatataatttaaaaaaaaaaaactcacataatttatatgctttagttatttatgataaaatataagagttaatatattttttatataaaaagctttgtcacttcatacatttcctttatccaaaaatccaaatagaagtttcgttttcggttaatttcagtgcaaagtattgttttgggtctgtttccaagccgcaatttccaaacgtacggacttcggaaccatgcgcttgttgtatagggcatgtggtagggtttggaccttgaatggtgtggtgaatagaaaatgtaccatgtttggtttaataagtggaaagaaagaaagaaaaaatgattttttagttatttggtagaatataaagtgaaaagaaaggaaaataagttcatcttctctaatttaattgagtagaaaataagaaacaaagatatattataaaataatataaatacctttaaacggaaataaaccataataaaaaataataacataaatatgcttccaataatacaaaaaaaaactagtcaaggtacaagataaattaaacaataataataacctaaaaaaatcatcaacttaaataaaataaaacaaaactagcaatattttataattcaaggattttttttcttttaactcaaatttacacactcccattctttctaaattcgaaataatcaaattttggcatcaaattcaccaaaaccttaattttcttccttaattatgtacaaattaatcacaaaatactttctttctattctttttctttcttcattttttttcattattgacatccaatgattttttgcaaattattaaatgtaattactgacgaaagttgggtttagcataagcttctaatccctcacaatatgatgaaataatgtttgaattcttgttggaagaggtgcactatgaaattgtacattgaacaaattgtctctaaaagaggatatatgtgaaaaacaaaacaaaaacgtaattattaagttgttattacagtaataaaatccttttagtgatttagttgtaaagtaaattaaaataatgaatattattatagaaatcaattttcttaaaataaagaggagcaactcactctctagattccaacacattcttttttttattggccaaaatttatcgacaactacaaaattttgagtgaacttattaaataaagggtaagactcaaacaatttataatttccaataattttaattaataataaaaacgtgttagaaaaaatataaaaaagagaccgcgttaagaaaaagaataagggaaaatatgtaactagcaattaacattaataataataaaataaataaatttttatcataattaaaaattattctcgagagtcatagtgtggtatgttaaattctcttatttatttattatttgtgataaacttttattataatcttcaattatgaagagagaaaaaaacacaagtgtgttgaaatgtttattttgttttatgttaccattagaagaataataagttaccccattgaatattcttttaataaataatagttttataaaatgttctgataatttaaaaattactatcacgtaatttataaatttttattaaatctaaaattatgaacatgtgaataacattgtagtactacaatagagtggagcgtgtactttaggatgatggcaggtaagtaataagtcggatcctgtcgccttggccggtttgtgaccacgtgattcttgttttgcccaactgtgaactcatcagccccaatttctgactttttgcccttttctcttgggatctcaaagttaggttttagattatttttttagtaacagtttaattaataaagttataaattataatcaatctatatatcacaacttttagatggattctttttatataaaaattaaattgcatgatttgattttaacttataaaaaaacttaatttattttactttttaattttctttctcttatttcaaacatacaattttattacaattgtaatcagtaattgagtaattgaacataaatgaattattaatatgttcagattaaaattgaatcatagaactaagttcaatttttacagacaatttttatattagtccagtttccctttttcaataaaaagtgaagggttaagaaaaaaaaaatatgacatcattaattcatccatctacattactaacttattgtagcaaattattttagcagtttgtcttaaatcaagtaataaaagaaagatagtgctagagagtggcattccatttggaatttccacccagtattctatgttgatgattatgatttgatttctccataatgagtggtgaatatttggtgggaaagttaacttttccacgacgatgatgtttgtgagtcaaatcaacacagcattggatgcgcacgctacaaaataagacacagagcctgttcctcaaagttggttggattagatatgatatgatgatttttttctagaacagaggcagtttctcaaactcgttgcctccgaactttcaatttcactgaattttagctcaaaaagttagcaaaaaagttccctacctctgttgggtctgtttcaaatctgcaattttcatacgtgtggagccataagcttgctatgtgtacgatacccaactttgtttttcctttatttgatcttacctctctttgtggatctaaaatgttgcttctttcttctgcagtgttacttgttagaattagatttccacactttgaagtgaggcaatttgattgaatttgaagttaatgcctttttgttcaaacgaaatcattggttttctgtttgtgtatgtatgcttattttagtttgtcaaatttgatgattcttgcgtttgatttagcttgtcttttggtgaagctgtattccttttatccttctctggttctattaatgtgggtagtgttttagatttgattctgcttcatcccaaccattgtgatttggtagtgaatttttgctatgtgggttagttctttttctctccccttgtttccatgataaattattatagttgagttggcattctcatcctgaagtatcaagtgtggttgttgttgtctcatggcatacaaagagagagtacattgcactgtataaatacctgttttgttttgaaatcgtgatgcacagtctataatgtttttgaattatttcagaattgttgttctgctgttgttgatttgatgctggaactatgtttttgttagtgaatctagtaactctccaccccatccccctttctcttgaaaattatgacgcatatctctttatttctatagctaggctttgtgtggataaatttatctttaagtacttataggaaaaagaaataaaaaagtaaaatagatcgaacttttttcataaattaaaattaatttttgcactttaacttttatagaagctaatttctaggaaagttaaagtgtataaaatgattttattgtatgaaagaagttcaattcatttactttcatattttattttctataagtatttgtatagaaatttatccaaacatagtcttaatacatgaaagataaaccaaaccaaataatttgttagaaatttatgactttacatctcaaatcacagggtgacactaatttgtaagtgtaacagatcactgaataattctgctgggagcattcatctcaaagactggaacatttggatattgaattggaggtgttactaataggagcatggctcagagtctggaaggtataaaaggtggaggaggatccatcaagctaggcaccactggaacaatcagttccttaatgacaagggaattggttcacatctcttctgcatcaaagaagcaggtatcttcaacaagaagtaaaactcaaacacttcctgtttctgttccctgtggcagtacaacccaaaaaagactacaacaaagaaaatcatcagttgaagccggtagcagtggaagcagtaaaactacaaaccgtagaggacctggcaatggcatgccccagaaaacaaaaactaatggcagaaatacgcagagagtacccatgctaggttctgataaatgttcagtggtcagaactccagtgagggagaaaaatgataaaaagatacctaacattgttgaaattgtggacataaaatgtgggaatgcagaaaaggcttgggctacacctttggcaagtcgtcttaagaagctcggtttttcgaagctatccgagagcattatctagacctgaaatttttttgtgtcagacttcaggttcctgtaactgaaggctgaggtcccatttggcctaccactgtctgatacatccaccatagaacacatacttggtaaaagcttgctacttcctctctttttctttgtactttcttctactgtagatacaattgtggttgtagaacttgtactaatggatgaactcacctctgtgatttgggacttgttcctttgtgaattggaaccaattctgctgaagtactcaatttcttgcattatgagtgatgcaactgtgcctctggttcctatttctactgggggaaatttatccttatcttttgtgtcatttgagtcaagggtagtggatttatgcatgcttttgttggttggtgttggggagaaagcaaaatcttttgatttaagggtggtttgtgggtttgttctagaggggaaactgcagagactttgaggcatttcttttgttacaggagatgtggtttcacaagaatgcttcaccttatgttctatatctgaaactgaaatccatggcataggtctatgtagatagatgggagattggttgatgacatagtcactgcattcatgtgcttgcagttataacactctagtcctaactactgtgccacctttttaagtttcatcatgttcctaagtacatgctactagctaggtcgttatttgaaactctggatctgatgggattcatgtgaaaggtaaaagtaggacgatctcttccattggcttttttaagtaaattggtgttttagttggcaaggaatagtaggttaactaaatcaggaaagcaactatttatttgagtgcttttcaggttaagggaattgtggattattttggttggctccatctattttgtaattttgtttcatatggggttctgcaggagtgtgagaaagatgtaacattatttacgaatctatatctatcaatgagttaagttgctattttgaaataagccaaaaaccatgctattaggaaaaccaagatgcaggattcatgtatcttaatttgcatccacaaggtgtgagacaagtgactattagcttgaatcttttaaatacatgatagacatttaatttttgattatgagaaaaaacaagtattcgtgagtaaaggaattactctttaaatagtactctacttttttaaaagattagtcttatggcttttgattatgaaaacactctgaattaaattccgaatctaaaaaaattgttaatttgcaactatagtatttgtgttagctgaatcttcctttggtatatttaaatattatcttcgttatggaatccatttcttccctttattctacttatctgcataaatttattgccaccctactttactaccaaaaagagagagcaagtttgaggaacttgtgtcttactcttcaaaaactgccaatcctactggacccttgtcacgacctttgctttggtgtcactcacgggtagtccatttcacttcttggccatagatttcattccataaggtggaaaaacaaaatcgttataaccaaagctaaggagtgtctcattcacgaaaaggaccaggaccttactattttatccatatagtgtgcattttaagaatatactagttccttcaaaattatacctatctttttgttgaggagataaaaacaactataaataggtgaggccatcgggttctcaaatcggataatatgaaagttaaagccaagatgattaatcaagttcggtttaaattttaagtaatccgaacaaatttatttttgtttggttcaagtcattcaattactaatgtaattgtacaataataattattaagtgtgaaaagaatcaagaaaaaattctaatcatattcttttactcaattgaaacatcttaaatcaaaagcaataaaatcaataaaactttttttaagaaaaaaatcctctcgactttgcaaagtgttgtgcaacagaattctcctctttctaaatcttgtcataggccaagcataatgccttcatttacatcatcgtagtgatgaatgataatgcatataaccaaaataaaacttcttatgatcacaatattgtagaggaaatcaacattgaaacatattatggcagaagatgaggataaataaaaatgtagaaaaaaaattacatgatctagtcaatgtaatcaacgtctagaggcagttagaaagattctatttcttgtatagagaacaatataaaactcttaaaatgtgaacaacacctctatttttaccctgactcataacctaataaactggttcatattccaaaaaaaaaaaaaaaaacacaaaaatgagtttggtctacatcgtggaggctctgccctcctaccctctcatgaggctcatagtttcaaattttgagctccacacattgcgttacaacttgaattgtccccgttagcaaaatacatatcaacatttcttcaccttgacttcaaagggtctcaagctatttgcaatcattcaccaagtccaaattatacttgaacgtctcagtagacaaaggccttgacaacatatccattaattttcagcaatggctatctttccatggagaacaacttatctttaatatcatcttgagttactttcaacctaatatcaatatgttttgattattttttaaaatgatagattgatagataaaattcttggccaaattcaatgcacatttactatcacaataaagaatatggcttggaacatctacacccaagttatcaatatgaccctacaaccgtatacattctttaactccttatgttaaagacgtgtattctaccccgatggctgacaaagcaattgatcgtgagacatttatagcatttttttaactccttatgttaaagatttcgtatcaaatagtattattgtaactttagatgactttttttaggacttaattatagacgactttatgtagacagtcttagtgattttattattaattgacacttgtaatcatacacgtcaatattcgctttccggggggacaatgaatacattaaaaagggaatgttaaaacttaaaaagaaccaattccaaggggtactcgaaattgctttagtaaacattaacaatgattatgtaggtttgttttacgttactcctctccggtcccaaataaccgattatgtggtttaagcaagtccgagagggaaaacaacatttctagttacaaatgctgatttattttggtctgtatattgtatatgttcataaaatgagttttatatatgcactccaaaatgggtacaacttgtaagatacttaacgtaaaagttataagtggtgttattagtacgaaaactggcaatatgaattcatataaattttaaagtgaaacaatctaagtgttgcataaaaattcaggtacgcaagagagtgaaaaccgtccccagttaacttgttccgcaacacagattaaaaccttagtcaaatgttaatccctccgtcccgtgtcttatttgaagaaaaaaaaattatctcaaaataaatgttatatttaacttttcaatataatattaattatttttttttttcacaaatatcatccctaacaagtgtttttttattttttaatgtaatattaatcttaagattaattttgtaaaattattattttttatctatttaataacttttttgtatctgtataaaataaaacatagttactgcttaaaataaagctcaagaagcttcttcaaagtgtcaagcacacttgtgaaaggattaagcgcaataggggagttgagtcctagatcaggaaattggtttgtaagtgcctgctgcattccggacatagacatcatagctgccaactgactattggacattacttcacaatcctgaggtgtatctttaattttgcttggatcatatccatagtttgcaaggtaagacttgtacttctctataaattcaggtccagggttaggtgtccttgagtatatctgcgatatagatcacagggaaattaacactacaagcaaaatcaaatcatacacttacatcctaattaatagctattaattaaagaactgtatgatgcagtattgtttctttaatttatcttaataataaattagctttagatgtcatatatgccatcgttgaaaattcagaaaaagccttttgaagttcaataactacaaacttaagctatattttttagttcagtaaatacctgaataaaacttttatccttagctccggaaacaagagaaaaattgtcataatcagtagcaatcacatcataaggttccttgggaatgaatggcaatgtaggaaagcggagatagcatttttcttttatcatttcctgcttctctagctgtgtctcagttttctccaaatcttctgaaagacattgaacccttcccctaattccagttataaatccattagggcctccatgaacacaaaaggtatcaacttggatggatggtgcttccctatcaaacgtatatacaccctgaaatgtcatagtatgcccaaattagtatcaagaagcttgtcgaagccaaataaggtaaatgataaatcttatctccaagatgtactaactgttatactactgaatgacagaattatccacacatgcataataaataatgaacaaccttagggttctgtctgtgcctccaaattcaacaatttattatgaataatatgaagttgattagggaaagatgttgaaagagcataaatataatgggctttttctaaaccaaatgacgtcctctatatttactgctatatttattttagcatttacctgagtgcaatgacagtcttcttggccttgtcccgcaaatccacgtttaagtgaagcaacttcaaaccatcttcctgaatatcttacagggtcaaagtcctttgctgtcattcctctcatcatcattagatttgaacctttttcattctcaaatggtgaagtaactgcattctcactgggaccggcaagttggcatatattatttggtgcacgagatagatctgctgcaatagtctgttaatgaagtaaatgagtacacattagatcagctcattcatcataagaatatacatctattttctagatttttttatcaatcaacaatatccagcctttgtaagaactcaaatatgggaaaaattcaagagtgatacaaaatatctatgcgagtaaagtgatccacatcagaaagtaatggcatcagataatgcaaaataattaatatttaatagcaatggcttttgctttgggcaatgtccatgtaattatggagttataaaaaagattatgaaccactatagctaaagtctctatacactaccatcagcaaagttttaacaaacaacttgtgatcgcgatttcggccacagcatcaaggttttcagagtcactgcaactgaatcgcaatcgcaattgcaatttgcagccacatcagttgcatttgtctacaatttcccgcaacatcaaggatcgcgatgaaactacaatttaaaactttgctatcatgtatttgggaaaaaaaaatactgtgagaacgttaagtaggtcctcctgatgggtattggacatatcacatcttgaaattgcatgattaactgaaatttcaatagtaagtagtaacactcttggattgtggaatacagtacaaacctgatttgctggagaaataaatatcaaggaagcagcaagcccagataagacatgctttgtcagaaccttacttgggacttccaatgagaacttcaccaatgtccttcctgacactatcctgcattgtctgtaaacaaaatgccatccaatttgcacaacaacagaaagataaattacaaaaataaaaataaaaaatcatacgatcccaggttgagtgagtatcatgttttagcaacagagttgatatttaacagtatctacaaatgaagagacaaaaaaatgcacttagaatcccaatgaaagaggaggaccacaaagaaagaaaaaaaagaaaggagtctgcaatctaattcactaaaatttggttattacacgacaaaattctgggagtatataaaggaaattcattcaggaatgctgtgtatatgaatatggaaaagctacattacataaactgaaaattgaagtccaccaaaaataaaaggaaccgaaaattaaatgtaagaaaaaaacagaaaaaagagtctgcaacaaacgtgggaaaaaaaatcattgttaaaatacttggaattaggagaaaattctaaagggaaaatctaaggggtgttccagaatggaaaaacaaataaagggacataaacacaagttgagcaacaaaattagaacattaaatattgctaaagatgaaaatggggacatattagttggatttgttacctcggataagaagaagggtgaggtggaggaggtgatgctcgtagaagaagctctaccatgtctttgccttttcacttgtccacagttgcccattctgaactttctattctgcttggtttcactttcatgacaaaaatcctcttgaaacatcgtcgtccaaggtcccatgaatcaaactgggcctgtttgaactggacattcaaggcccaatctatgtacaaccactttaactaactaactgtattattcggttgaaggcttaaagctaactaacagttgatcctaacacctttcttctgaccaccaaatatagatgagtgttagcgcagaatattatctaacacacttttttctcatacactattttatcgattaattaaaaactttctttaaataaaaagtgaaaccaaaacaatttggtgttttctataaagttcaactaataataaaaatttagctagaaagagtgtaataacaagataaaatgaattgaacttctatataatctaaaatcaacttatgcaccataaattttatagaaattaaatgaaaaaacaaacttctatacaattaagtgtaaaagttaattttaacttttgaaagaacttgaatttattttatcttattttcttctcttataaataaatttattcaaataaaatcttaatatttacacattagtaaatgtgtgtaaggagtgttgaacaattaacatttatttatttatttaaattagaaaagaagtcagaaagcatttgctcagctagttgaaatatgagaacaattttgttatttttcttaattcataacattaataatataaaaaaaaaaacgtaggtttatttgtgtcgtgtgtttgctcatgcttgtatgtacgctcggcttgtaggacattaggaatagtgattgaattctaatttaagagaagtgattttttttccaattaattcctgattgcgttgttcattttgggtttataaggaaataataggcaggaacctcaactcatgaaaccgttttctttattggtggtgacgagaccaaagccaaaaaaataaatagtgggagagttaatggctaacgccaaatttagagaaaacatgtgaacaaattgagaagttctgggaataatttgttagatttggtcattttaattaggttatagacaacctttaaaaaaaactgtgtcaaaatgaggttttgctttattctgttttccataaagttactctcatccatgaattcgatcaagtgtattattccatttccacattaatcttatttaattaacaaccaaatgtcactttcagtgagtttggtaaactattttagttatctaataactttatgaatttatttgactaaagtatacgtgtttgatcaagaaatttatctcattagcttataacgtttatttattttctacttaaaataacgtaatttgtagcgtataatttaacataatattttcatttttatcattaatattttaataaaatttctcatatatagcttccttgttactatattaattcaatttatttttatttttaatacaatatttgatctgtaaataaaaaataataagagttcaacttcaacctaaaaacatgtatatttaaaactttttataacttccaattgattcatcaagtatttttgttaaacataactaattatcaaattatattaaaaccctacttattaagatttttttctcaaagcttattgtggactaaaactaatggaagaaaaagtctcttttaagctcaaaaatccctttgaggacgatagtgtttcagatattgacactcaatcgagtttatttgccataaaaaaaaattgagttttttcttcttctacgataattgtgaaacatacgtattacaagatataataaactattgagtaagtagaggagatccttgcaggattgtatacaggagattgtcattgtattaagaaataaagtcttgacatgcacatgctagtttttaggtcactgtattttattcaaataatttaaataataaatgtagaaacaaccaatattactatttcttttattatatccacgagtatatgtactatttaaaaaaacttaatttgaaaagaaaaacaattgttagaaaattaaataagttaaatttttatggttctatagttgattatttgagtgcttatattttaaaaaaaaaaaatcattctattaagtgtgtcttttgaggttcttctcaacaaatgaagtgtgcaagatttccaaattaaattgtataaagatgatatgcaaacccaccgaaagtatttcacgtacaatacacgcattattgaattttaggaagacaaaaatcccaacttttacaaaacccactttgaaactttaccaaacttccacgatcaaataacacaaaaatcaatttacaaaggaccccatcactcaattacaccgattacaggtcttgcaattaagcataattccaagtcgtgtgcatttcactttctttctgtttgtcaacacgtatgttcgtattctaggcatcaacatctaacgcaaactgtaaacctaattctagttagttgatcctgagttcaatttagtaaacctaattatcaacgacagtgttcgtagttacgtgtaagttagcgaaattaattatacttatatagtaattagcagtggttacatatatatactaatgtcagtttggtgagaaccttttcgttcatttcattacattatcctaactccatgatctatgtaactaacaaaataaattcatattaaaatatataaaatatattaaagatagataggttggtgggtttatataattaatcaataaaactttagctagataccttgctctagagtctaaacttttatagatggaccacattcaaaaaagggtagcatccctaagtaaagtataaggtcagtcatggatatagctaggttcatttagggcaacatttggaattacaaatattccacaataaattaatagcaaataggttttagatatgaagtggtgttctctatcttgggtcatcgaccagcgtgccacatttttttaaaaatattgtctaaatgtcacgcatacagtaaattttaccagactgtcacattgcctatttcgctatgcagtccagcgaaatatgtgaactgacgtgacgtaattctggtgaccacatattttgttacaggggccagcgaaatacatgatcaaaacgagcaggacacgtgacaaacatgaggtatttcgctggagagtccaacgaattacgtgtcaatagaaaaaaaaaaaatctcaaaacttcaaacggtcataacttttgatagaattgtccgatgaaggcgtacgatttgtcaaaacacttaaaattcagagaggaaaccctaggcaaagtccctaaggagatttgctccactattttttcttcttccaaaaaacgtctctaagtgcctcaaaattaggatttaagcgtacaatatatcctttaaatagtctaacttttaataaaaatattggatcgagacgtatgatatgtcaaaacactcaaaattaagaaaaataattttaaaaataaaaatagaattaaattaactaattaaataattaaaaaagtaaaaaaataataaattttttggatgattgaatcctaaatcctaattttgatgtgaactagcgatgaaataacaaaaaatctaacagcatatttggattagcgttaatatatactggatccatgtttatccaaagctgttacaagtagcttctgcgtcattttagtgtttatattaacgtgaaaatcttcctgtacgtggatctaaaaggcaccctaagccaacggaacttctctactttatttacaataaccccgataatttgttaggcatgccccattgctctgataatctattatttgtgctactatagtcgattatatgcacactaaaatttgttatgtatgcccccaataatgtattatgcgtagataatctattatgtcctgcaaattggatcctataactatctaatattcatatgtgagagtttagagtttatatacaatgatggaatagaatttttatatctaatctaattcctcttttcttcttctatccaaatcaaacagtttcataatatatttttttcttttacttttacttatcttggacctaattaagaatctaaaattttatctaatttcttatttattactcttatttctatttttttactatcctatttttatttactttacttcttttctcgctggtgtaagtaatgttatctacaaatctatagtataattttgagtaaatattacctgcaagtaataatattttaaaggagaatcatgcatggcaattgggagacccatatacatatagtatgtccacatctgatgtgtagttggttatttaatttgaattttataatgtatattttaaatttgaatcatacattttggtgtcagggaaaagataggaagattgcagagttgcagcagcctttttctttatcaaatgtagttttcacttttttgctctcagtgtgatcagtagattcagatccaccaatcagagcagcaatctgtaatttgtctaatcataccaacaaattgatggtatactgtacccacttccactaataataacacaaacccaaatataattagcggttctgtggctcccttaaattcctaatgtgaaaattagttaaatactataaatctagtagaatctaatcatggtctattcttcactttttaaattagtctgaaatcaacttaatcaaatgtaaacattttattttctttctttttaattaattttactattatcatttgtaattgactttagcaaaactaattcaaaagcgcgtttaacttcacatacattagacgtgtctaacatgctaaataaaattttttgtgttattaacatgctaaataacaaacgtttgcttcttttggtaaatattttattaaatactagacgtgtttaacatgttaaatattaaatgtttagtttttttagtagatattttgttaaatattagacgcgtttaagtttactactattattaaataacagtatatattttcataatttcatgctaaaatgtattaaactttaaaatataaaatatataatattttaataaaaaattctgcgctctttcaaattggtttttaatttataaaatatttaattcaaattaaagatataattatgttttatattttttttctttcaaaaaggataaatatgattagaatattaagtatgaacctctgatatttagaaactcttaaacagtgcagtcgtatttttattatttttttattttgagaagaacgtgaccattcactaacggttcaatcctttaatacatgtaatcattctcatcatgtcttcaattcaatttcaaactaatactagaatgctaataataatcagcaagaaatatcaaaataaaataatctccaactctttcagtcatgaatgttattatttaaagcacgggaattaaacaagaaattacgctacgtggtcacatcatgcgccctctccacagcagataactcctcatcacactcggtttttcaattcctatcctatatatcctcataagatgccgaatgcatcatgacaattgagaaagatacatatacttctctcataccacaccccataacactcttgttcgatttcttatacaagaaataaaatgataagagaagggataagtttgagataaaataacacaaatattcttgaacagccatgaacctttttgacatctaagagtggaagaaagaaaacagaaaaaaaaaagatataataaaaaatatgatgttataaaaaaataaaaaaataatgagtgctattttttcttacttttataaaaatatatttgtataaataatactacaactacaggttaaaggtgtgcaagaaaacactcagactgaatcgatcgagttgtaatcgaaccaattttcacctaaattattttttttaaaaaagaactatattattgtactaaagaggttcggttaacctaattgttaataaaccaattttcatccaattaaatcagtttttttctttttataaaaataaaacagtcctaaaactcgttcaaaattagttcaattcttaaaattgatttaaaactgattcaaaatcaattcaatttacaattaatttttaaaattaattcaattttcgaaccaattatttataataatttgactatttggatttttgaatcggttaaaacagtttagaataaatttggttcgatttttttttttttttgtaaggaataggtttttgcacaccccctactacaggttcatttaccatattacccatctctacgcagaaaccaagaaggcggcaatacggagagtttaggaaaccgaaatgaaaaataccggtcaactgtcccctatattaaacagtgggaccgagaaaccagactaatagaccaaacgcaccgcaacaagaagaacaacaaagaagaagattaggtactaactatctatctgttatgtgaatattcaccgagaagaaaccatgctcgatggcgaagaagatcattcacgacaccactaggaagatgtctcagctgtgccggaaaatcgttcaggtcgaagtccggtggggtgtcctcagaagggtatctttcgttggccactttttccgtttcatttggaacagacttcttgtttgctctgtcgccggaaggccatctcactaccggaaactagccctccgggacccctcttcttcgccgctggccaccgttgacgacgtcttctcctccgttgcaaccactactggcgactatgactccgattccgatttggtgaacctcaagatcagcttgttgggtgattgccatattggaaaaactacttttgtggtcagcatgtttctaactttaccatttcttttttgttttggtttttggaagaatttaacaagtgtgtactagaaatttaaaaacttttacatcattatcaacatggtatgacataattaacaaataaacaggaatcttaagcttgtattcaggcttcaatttcaggtctatgcatataagagactgtttttgtctccaaagattagtagataactctcaaccagaatactctcagcactcaatttttttatgtaatattaaaaaattacttttataaaattcttaagcttgtttatcatgagaattaacaaatttactatatatgagaaagtttgtgattagattctccctacatatattatttatttcttttgaaattggtcaagtgtagtagtcttttattttaacgggtctaattaactagcttgtggttatgtgaattcctattctcagatcaagtatgtggggaatgagcaagaaaagagaagcttacagatggaaggattgaatctaatggacaaaactttgtctgttcaaggagctcgtatttcgtttagaatatgggatgttgcaggttctttgcttaaactttacctttctttccctttatttttctctgttttgtctgtgtatactttttagttttcattctttttagtgttctgggtttgttggtttgagttaattgacttattgacggtgactttatattatgtggcgtgtgtaggagataaaaggtccttggatcaaattcccatggcttgtaaagatgcggttgcgattttgattatgttcgatctcaccagtcgttgtacactaaataggtaggctaagagatactattatctgtgtcatgagttaggtgaagggttcttacttcttagaaacgtaatggtagaaataatgatgatttgcgttttttgtactttgttatgttcgtgcagtgttgttcgatggtatagtgaagcaagacagtggaataaggtaccgtaaaaaataattttgcagggcttatatatagtactattacatgaattgattttatttcagaaagtgtctgccactgtttaaattaaagtgtagtttccaaaggcttttggcatggaaactctttttgtaaaacacgagagaaattttgaagtagcagtgcaaatggtttgagtatccacaggaaagtgacattaatttttttcattaagactggacagagaaatgaactctgattattgacttgccggggtatactattttttcaagatatcaaaatggcttgttaatataactaaatattctgttttaggctgataatatccaaattttgaagattttgacgtattttttatgaaatttctgatgacatttaatctgttcaatttgcagactgcaattccaattctaataggaaccaagtttgacgattttgttagacttcccccagatgtgcaatggacaattgtaacagaggtaaatcaatgaaataataacaattactgctgcaaattaggttttggtaacttaatttctcttaatcatagtacatatatggatgggggctgctttacttgccttggtcattttcacctattgactcgggaacaaagaataattcttctagtaataaataggagtcttatttggaacctcagcatgtgtcatttatgaaagttccatgtttccgcgtttaacattaactttggggcttacatgttgattaaagtcggatcagtgatgtgttcacagttcactactttcactttaaataaagttaatactacaactttttatcacattccttggtttttcaatgtttaacctggtacgtcacataaatacaggcaaggggatatgcaagggcgatgaaggcaacccttttcttttcaagtgcaacccacaacataaatgtcaacaaaattttcaagtttatcatggccaagctctttaacttaccatggacagtggaacgaaatttgaaacttggagaacccataattgacttctaaattgttctttacacactgattcgtatgtatatagcaggacaaaggagaataaaaaatagaatgagaaagaaagaaaacaagtcaactttttcatatatattggctgggacctatcaccattcaccacctagatacctaatttacatgtctcaatatataggccattttgactatacgtctttaggcttacccctgttgtggctgaggtcaaagcccacaggtcttgataattttatttctacgtgccctgataaaggagaaattctatttccatataacttttgtatgatattttttttattcatttaatgttactctctaacacattttcttttataattgttcaatatttctaagaaattatagtattacgagtgagaataactgaataaagagtaaaacctagatgaatgtgtaatgtgttgtttatatttgtcttgattttgaagtgatgtaatatctttgaatgtgatttatagtgatgcaattatgttgaatgtttttattgtaaaagcatatatatatatatatatatatatatatataaattttccttatttttttttgtcgttatatgaatcacttaaatttataatagtcgttaaatttaactaaatttaatgttcctgaattcatttaaggaaaagttaagttattgacattaatattatttttatatataattttaatattagatagtaatattttatttatgatataattttattttaaattaataattaagaatagaaattaaataataagttatatgtgattatattcaatctttttttttcaaatcttaaatactataataataataatttgattattattgttattaaaattaaaataatagtctatattatatatatatatatatatatatataacttcaattgaaatattaagaaccataatattaatattttgatttcataataatcgttaatctaatttaattatgtaaccttcattttaatatatttttacataaaaaacaaagcaatagtatcatgtcaactaaaagtagtttcatataatattcttagtttatattttaaaattttgatatttatctaatacatataaatttgacttgttaaaaagttcaaattttatttatttaatttttagaaagatatttattttcatcaaatgcaacagcatgtcatttaaaagaaattttaaatatcattttaatttacattttttttacattatgtaaaaaatataaatatattatatatttttaagaacttcattttttatttattttatatttattttcatctttaaaaagagaaagaaatgcgcaaagtaatatatattaattaaaggaacatttagttagccttcctcccgtgttcaataggaacccaatacacaattcctaagaaaagaaaacaagtactatgtcatagaaagctgatgtaaattgcgtatttttaagtaaccaccaaattcaataccctcatgtaattaaacttacgaaatctaaaaaatgaatacacagcttgatgaaatcagtgaaataaagtcttagcagcaaagagatgttataacatcatatcgactttgttgtcgagtttatacactaacatttaatgtagcacccagtcacacattcacaatactctcaaattaaaatattattactaatttattaacagattgatatctccaagtttcttgaagcccttggaactgtcaacaaaaattctgcatctttacggaatcgaggttccatggtcctaccagaatcatctttcaacatgtttatactaacccttttcaacatatccccattaccgatgaaatacatgagcacaaaaagttcattctcagttccacagaacccattaatctccaccacttccagacttgaactcaagcttgcataaactcccacgttgtccctccagaatcgcgtgcggttaaacagaaacggtgtttcataatcctaagtacattatatgtaacaaaaaattagcagctttttttatttttcaaatgaaaaaaccacacatataggcaaagcaaattttaaaaccacacatataggcaaagcaaattcaaaaacctaatatatataaaggataaacaaattcaatgtatgtgattgatactcacaaacaaatttttttcgaaacatagatcaatggtgagacactctaacatcgggcaactgttgaggaagaatgtgattcccaaaaactcgttcttgtccaaagccgtcttcaagatcaaatgttgcacaagcatgtcacttcgaaaacctagcagttcgggtccggtaggaataatcttatcgcatcacacacaaaaaaacgtcaattgaaaccatcaacaaatcattttgtaattagatatttcaattcagtgaaaaagaaatggaacaaattgatcaaaagagtggaactctgaaagttataattataaaagtagaatatatgataacgtacaattaagaaattaatatcaatagagaaaaggtgatgaagaatgtatacctgaagaacaaaactgcatacagtcaaaactctaacaatagatagattttccaccagattataaagaggatgaccaaatccttcgaagccatattcttgagagaaatcaatatttgcctcttccattgagtgtgaatgaatttccgtgatgaaaaagttcattaacccacagtactggaaaatttttagatctggtgcgttcactttgaaaacatcaaattcaaagcggcacttgtccaggacaagctttctaagacccttatgttgttcgtcgcctaggtcaaacttgtctgagttccaacaacttttaaaactcaaactctccagcatgttacaattggaaagcaaagctttgctagcactgagtctcacttccatccaacccaaagaaacttctttgagtgcatgaaagttaagcacttcagtctcaacaaaactacaagaatatagcttcaaagactcaaggctaccatgctggtaaactcgtgctggcaattgaaactgcgcctcgtcataattaccataataattttcattccagttcggatcagcaaagtcaagttccaactccttcaccccacgttctgtggcaaaagcagcgcattgatcaatgatctcaccagcatttctaggatttcataacctaaaagagaacttctccaccaaagttcctttgtgattttcaatccacaaattaatgaagtcaagaaaagtccttctttggatttctcttgtttcattaggttgatcaggtttaacaaaaaagagttcatcaaactctatgttttttgtgaacttgcaaacgttcaactccaaccatttcttcgagaggatagaagttctcacagcttccttgaagggaagaagtgaaacgatagttataagcaattccattggcaacgaatagatgctcattgccatggttctagctatatgatatggtgattgataataaagatgtggataagactattagggtactgaatttttcttcaaatattccaatgggattgaaatgtgtgtgtgaaatggccaatgagtgctaccttatatatgcaacagacgttgcttcagtgagaaaacaatgttgcatacttctatatggatttttgtattttttttttcttttctgtaaattccatgtatacgttgccgttattagaattttttttaggaaaacataaatatatatattaattaattactataatatattactgttggatttagaatgaaggcaacctttggtgaaaatgcataaaattttaatgggattgttttcttcatttgtgtttttcttttttgtagattgtatatatccattaattaatttcctcaagtcccacaatggtttccattgttttttttacggtcaatggtttccatggttagcaataaattttaagaaatatttgcaatcaattactttacatttgttatttgtatttcaaatatttttaatgaattcaacctacgtttacagtttttatatgttgcataaagtaaatgatcagtttttatataaattttgtgtgtgtattaattgaagaaagagagaatgtgagggcaaataaaagaagaaagagaaacaaataaatgtgaactagtgtaggatcattaatattttaagattaattaattagttgtacatgtattaattattttaagagtctaatttttaaatattaattgtttgtgtaaaaattctcatccaaataaaaattactctattcatttcaaaataaatctcagtctgtttttttattcttacacagacaaagaaagttaataaatagataaaaaaagagtagtaatttttttataaaaaaaaaatgttaatgagtatcctaagattaagaaagtaaaagaggataatatatattattggaaacagtgaaaaaagtgttttcctatgatatttaaatgcactccgcatgattttcaatataaattttcctatttttgatttcttaattagtgttcttagaatcacaaaattcattttataaaactaaacttattattaatgttatattgaaaagctaaattaaacttattaggagtattattgaaaaaaagtaattgatattaaattggaaagttaacataacactgattttaggataatatttatttttaaatataacacttattttgggatggaagaagttcaataaaattatttttggtctaagaattatttgatttaaaatttattttaatgttaaaacttaaaataagaatttcaaaaataaagaaaaaattgttggcttaatatgttttccatatgtgtaatattttccatttgtatttcactatctaaccttttttttttattacctgaaatattttatgtttgactttagtatcatttgtcagtcagactttgttaatattaaatataatattaattaaaaaattaatgctaattataaaagataaaatatttaaaaacttctatattatttttcaataatactatttttatatggtaaaaataataaacttaataatttttatattatttggaaagtaatttaataaatatatatttagaactttgaaacttaaacataaataaaaaaatttaaagataatttacaaatagtatattatatataatattaattaaaaaatcagtattagttataaaagataaaatatttaaaaacttctatattattttttaataatactatttttatatggtaaaaataatgtatttaaatcaaatttaagaatttaatatcatttgaaaaataatttaacatatataccattttaatttagaattttgaaacttaaccacaaattaaaatcttaagaaatattttggaatgtaaattaaatcaataacttctatatgactgatatgacataattacacttttaatcacttataattatgatacataaaatactagaaatataattaagacatgtcaatttgttttttaaataacatgttaaatgtcacttcatcgacatgtgcttatttagtgtcacataagaaaaatttattaaatattttaaaaaaagtatgaaaaaaagactaaaaatgcataattaattgtgacatttaaaagattcaattcacgcaactgtgccttcagagtccaaaatcactaaatcatgatatatctaatgtatcaaaaataaaattaagcctaaaaatgtctaagacttgatatatatatatatatatatatatatatatattataattagtagcatactagttataaagtttttactataatttaaatttaaaaaaagtaagccatagatgagaagtaccacttgctccctgacttaccccaagttaaaaacactttgcaaattctaccaagttagtatatcaattttgttttagattacactatctcaataaaaagaaaaaaaaattattatttctcttgccataaaagcaacaaacttggattctgtcttcatgattctttgtccttttgataaaatactacataacataaatctgcatagcttttagattgtgtctgtcaatatccacgcttgatatatattgatattagaatgcacataaatactaaattttagccttaaaagaatgaaaaatcttaagctgaaacacaattaaaagctattattgtaaaatgaattttttaaataacatatatatatatatatatatatatatatatgcatctaatgaaatctgtgaaatctaaataaaatgcgtttatataatatagacaaatgtcttgtattaataagtaacgtttgcaaactaaaaatgcataacaacaaagaccaggattagcacttaaacatataacatggtaagttgttttttttttttttgaataaaaagttgaaggttctataaaataatattaaagatagagtactttttcaagacattcaaacactttcttcaaaatgtaaattacatccgcaacccctagttttgcttaaatttcatcttatactctttcctttttgcacctacaaaaaatcttttaattgtttagctcacattacacccagaccccctccatcctaaacaccgtttaataatttaacagaaaataggcacatgctggtcatatgacttttaatgaaattttatgtttaaaataccctcatcttcttcctctcaacctgaaaatattttaagactcttattttttttctctaattaaatgtgaatccatctttttgttaaacgtgaatccaccttcttgatacgcagtattaaccctcttccttcttcttcttcaattttttagttcagtttttttctctgattgaatataatcatttgcttcaaatttagtattttgttcctacatttgtgttcttatggaaccaaacatcaacactattttaatcaataataataaacaaatgattttcagttcatcccaaatatcaatactattttagtcaataatgataaacaaatgattttaaatatcataagtggtcccaaactggtcctctatttaaaccccattcagaaatagacaacaataaacaatcaaaattaaataaatattcttaaaaagaatctatatacaaggttcaatagtcacttacaagcagaattctagtgtgaacagaaatcgtggaacataaagagaaacagaggaacagtggagaactcgcgtactggaagagaaacgatgaagaagtcatgaatggtgaagaggaatagaacgtgaacttcatgagaggaagaggaactcgcaccctgtggacattaaagaaaactcgccaacaagaggaagatgaatattacttgtgaataaggaaaatgaattaaaggtaaaccctaaattttgaaactaattgggaggggataattttaattttacaattaaaatataaggataatttcgtctgctcacatattttaattgatgttagttaactgcgttaacagaaggaggtaaaagtaatatgaaaaaagagagaggtatcaggtgaaatttgagtaaaatacaagggatacgagtgtaatttcctcaactatgtgttaaaagattgatatctctgagtttctgccatttgacggcaatgagactccacagtcttaccggaatcatccttcaacatgtttatgctactctttttcaagacaaatccacgaaagatcaaatacttgagcaagaggtgttcatttagagttcctctaaagccattaatttccaccacttctcgacttgaactcaatcattcacaaacatccaaatattcaatccagaattgtgtgctgttaaaataaaacggtggttcataatcctacaatatacaacagaaattagactccttttttgttaatagaaaataaccacaacatatattgatgtgttaaaagcaaattcaaaacttaacacacacacacatatatatgtatataggaaaaacaaattggatttacgtaattgatactcacaaacaactcattatgttgcaaggccatcttcatgatcacatgtacatccatgtcaggttccatacgttcgggaccagtaggaatcaccttaaaatatcacacacaatacgttaattaaaacaatttagataagatagatattgtaattaatccatatttcagttcatccaaacagaaatggagcacgtcaaaagagtgaaagttatcatggactataagcgtaactatacacttatacataattataaaactagtactaatatatgataacaattgacaaattaattatgagggaggaaaaggtgatgatcatgaagaatttagcacaaaactacttacagtcaaaactttagcagtacaaacatcttccacgaaactgtagataggataaccaaatccttcaaatgaatattctagagagaaatcaagatctatctcttccattgcgagtgaatcaatttctatgagctaggtcaaagttcatccacccgcaatacttgaaaattttgagatttgtttcagtaattgactttgaaataatcaaaatcaaagccgcattagtccaggacgagctttgtcagatccatgtgtttttctttacctaggtcaaacttgtctgaattccaacaccttttaaaactcaaactctccagcatgttacaattggaaagcaaagccttgatagcactgagtctcacttccatccaacccaaagaaatttgtttgagcacgagaattaaacactttagtctcaataaaactacatgaatatatatagcttcaaagactcaaggcttaaatgagtgtatcttatgtattttcctatcaaacatgtagtaaatacaagtgatttgacaaaatgaagaaacacccatgcctagaaatagcatataggaaaatattcaatttacacactttctttttcatacatctctttttcattttagttttatctctatttttcatcacatctatcactttatctctcttttttctttatttctctttcttccttccacctcatgccatctcttttttgggtttacatttatcaggttcacagcatacataagagtgattctttcaaatggaacttgttagttgtagtgaccatatagacatggacgctcaaacttttatgctactatctagattcaacgataagtaaatctaaacttaagtgtggtgatccaaaatataaacaaattaatcttaattaatttcactctatttaatggtattctttctaaaatattctttaattaatttagattttatttttaacaaccttatattattgcgatatgaatcgtatgactttcaaaatagagaaagtattatcattcgaaacaagttctcctaaaattgaagtatttcatcagtaagcatgaaaggtagtttaggaaatgaagttcattttttaaatgagattagtctcatattactaatctattatttgtcagtggcatatttctcactcaaaatttcataagctcctgatacaactttcactgagtctatgttagctcaatttgagacacagcaaaaaccaaagctacatacaagaatcacccaccccaaagtaatgattctcataaattgtctgatggtgtgaggtgaggtgagcaatcttcaagccattaaaaatattataaatacattagattatgtttcttcattaattctcaaaaaattgaccgaaatccaattattattagatggcctagagagagattgacagtgcatgaattaagtagtgcagaagtaagaattataaagttgatttggtggttgaaggaaaaaagatgttgtaagttcgaattcgctcactaacaaaaactaacgaataacatttatcgataaaaaaaaaaataggacagaagtataatcacggagcaacacggacacggggcagttaactgggcctccatctgctaatcaaaggttaatttaaagcaagaatgacccaaaaatataaattaaagctccagccagcatcttcactagtgttagcaagcattaatgggaatcataacgaccattataaacaagatcaccgtactttgattattattaagaaaaccttattataatatgccatgcatgtcttgagaaattatcctcagaccaaacaaatacagatgtttattcctcaaacttaatgataattcagaaatagaggggggcaaaaaactaataatctctaataataatgttccacagctgtgtcatcattattaattattatgtacaattaggcagacagccggatcaaccagtctttaccataatccagctaccacattccaaaactaacttccttatcggtgaccttgtatgaccacatgtaaagaagttcggggataattctcaattcctcaaccctactgatttgcctgcaaaaaatgagtagaatgagagattgtgtatacctgcaactaaaattgttgttttcaaaagaaaaccacattataagcaatccacatagtcagtactctgtttcttactttcttaccaccaatctttttcttgatatttcaaggccctccacaacaaactatatttaaaaagatactaaacatgtgaacaaatggattggtgcagtcaacttttgaagctttgatatgctaattcgtaataacatagatttagaaaaggaataaaaactatggtgggttcaaaccaatagcagttaggtcataggcggcaattcaaagtgaagctacttaataaaaatcagatcacctaatttagaatagctccatcactcaattctaacctatgactataaatctcaaatttttccttctagtgtacttacaaaatcaaattgttccaccaaatatcttttgaagtataattccaagacagtttgcacactagtattagacagtgtaggttcctccacctaatcacccaatgtctaacaacacaatctatgtcacccctgaagctagcctccaaaaccaacctaatacaacctttgaaaaggatcctccaaggctccaaccaataagaggtaagagtatgagcatgtatatggttcatttagtgcatgatatggccaaggggcacaatagttaacaataaaatatcactatagaaaattctcatctagataatacctgtgaatacaagaaggttccgaagatggcaatagcagctcctagagcattaataggctgaactggtgtgtggaagataatgattgaagaaactataacagatatacgtttcatggtgtttccaatgctaaatgtcaagggagagatctcatccagagacatgtatgacacttgattgtacagatgataaaatatgctctgagctgccacccacctgttgtgcacaagtagcagccatatgtttaatcataagacaaaacaatgcagaagattttcagaaccacaagtgaaaggacaagaatattagataactcaaaatcaaaaacaaaagaactcaggtcaatttcccgtttgaaaatccaaacacataaatcaggtttcacaccagcttcacggtcagcagcatatgtgtatgtgaaggtgagaactcttaatttttgtgagaaatgaaaacattggattacaactgttagattgaaataaactgttaattgcatatttaatttccaatctcacatgatctttgattaaaaaggaaaaaatcacgtgaggtttacaattaaataaacaatttgaactgaaaatttaaaatcaaatttttataatgaaatgtttgcatttctcaaaataaccaagaacaattaagatttaaaacaaaaatcatgcaactttttagtcatgctacttttatgtagcttttaatgttgatcatctatgactagttatacgaaaaaagatttgctctaatttctaataactacaaagcaactccataaacaatccaaccacttccaccttaccttctcctgctctgagatagtgtacacattacaaaaacaaatgaactaataatttgcgcaacatccaataaatttgaatttctgaaaaggacacaagatgccgacaataattgtcggaaaaaaaatattatgaatttatgacaatttcaagatatcacctttacagaaacatagcatagataacatcagatagagtagacattttgtaattaccatattatttggggtccaatttgagagagtgctgtttgccatccagctgcccacatctgtggtccctccacagcaatcgcaaatggtgtgagaattacaagggacaacatagataaacaaccatagtaattcattccactaatatcctttcccttcatgccctttttcgaatagatattacggagtacaaatgccaaatttgatatcatagcccccataaaacctgaaaaatataataaaacagtaatgaaatcaaaaccaggagggtgtgaaggactcctatgcagaaaagatgaaaagttatgtacattccatcataacctctgctaatggcataaacacccaagaatcttatataatagtaaatcatccattccgttggtggctcaacacaagcatgaacacataataattaaaatatatacatagaattccagtaataatcactttgcttgtggaggaagaaggggaagggtattgtgacattgccttaatcaataacttgccatcaaattatcttctctcgggtcaaattttttagttcaactcagattatcttctcatatccaacttttatactatgttcaacaacaaaatacaaaatagaacaaaattagataacaaatcatttttttgttagaaaagcaacttctttaccaatcatattgaaattgagctcagtcacagctgcaagagcacatccaccgatgattggaatcaaagacaggtagactggcgctgggaattcctcgcccattagtctggaaaccattacactgaaagcaggctcagcactcttaataatatgggtgaatgatacggcaacttttgacatgctaacagttgccgctacatgtcctattgtatgtaaaacagcaacctgcgggggaaaacagcaaacactaaggtcccaatccatatcaagatgttaataaacaaataaataaatagggggaaaagccaaaacgattcaagttcttaattaaattgcggtcacagacgcggtctaggtttcatcaggatctttgatattgcggcgaattgcagccacaaaggccacaaaagccttgacattgcggccaaaatcactgtcacaaacaattttctaaaacctttccaaaacttaaatttccatcgttaaaaaaaaaatctctctggtaaacctcctcccattcatcaacatagtttaaatgaattaacttttctctttctctttttcatgaaatcgtcaagcttccctgaagtcaaaccacacacacacacacacacacacacacagagatatatatatcaaaacatgggacaaaatagttcttaaaaaaaatgttttccccagaacaagtacacgtaaattataacaaatgaacaaacaaaaaagtatgctttcattttctcccatcaaatttatcctgaggaaacaaacaaaagtgagtcacttacagggaacaaattcttccagaactgaagatcagtcttaggaggctcaactatcttggtggcccaacagaacaacattatgagagagccacatgcaagggagagagttgaggtaagccaagggtatgggaatgcattcagcaccttcttgttataaatgttgaacaccacattcagtgcccaccatgttgcaaagtatatcccaatcttcaccttcttagcagcctctgatggagccccagcccctccaacctctgatctatcagcctcataagcctcacatgtcacgaaatcagcacgctcacgcctcaccagagacccaacgaaatctccaaaaccaacacgagaaaggtgcagtggcttttgcactgacaccaatgatctcagagagtttttttcccttgaagaaggtgaaacaagggaacatgactgaactggggttgaagctgaacactttttacgcaggaaaagatcagaacctctgatggatatggcgggttgtttcacggtgcaaatcatggtgtgcgatcacactgatgaaacgatgaaaaatatatttaaaaactaacaataaaaatctaaactttctgacgagaaccttaatgggttgctaaacaattgatgggagaataaaaaaacgagagaagaaagtagggatcccgtgcgaatgtgtcagtgtcagagccgtgatacgaactctcacggactgagcactattttttttatgtgatttgagaatgttgctgtgatgatttggctcaatgtgaatgtgatgcccctctgagatcctcagatgtttagtttagtgcaaatcgaagttactgcggcagaatccgataaacttactaggttgttaccttaatttagaaaagatcaagcataaaaatagaaaagatatggtaaactttttaaggatcgatgactaggaatctgttttgggagatgctgagacgaagggatatattgaatcaggatttttaaatatttttaaatagtataaataaacattttagattgaatcaggatttttaaatattttaaagtattataaataaactttttagattgaatcaggatttttaaatatttttaaataatataaataaactttttagaattcaattaagatggttaagatttttaaaaaaataataaattttagtgttaattaattatgattttttataatttataaaaagttttttgttaaaaaatacatataaattttgatagattatattttaagattttgacagatattatcataatttttaggataaaatatctatcaaaattttgatagattattttttaaaatttggatgaattttattgtactttttagtataaaatatttatcaaataatttcatccaaatttttaaaatttgatagattattttttaaaatttggatgaattttattgtactttttagtataaaatatttatcaaataatttcatccaaatttttaaaatttgataaattattttttaaaatttggatgaattttattgtactttttagtataaaatatttatcaaataatttcatccaaatttttaaaattctattggacttttttcttatttttttattgattaacatattttcttttctctcatcacacgtatttttttctctttttaatatttttaaagatgtgtgtatcatatgtttctcctattcttttgaaataaaaaaaatgttaattatatttttttttctctgcattttttcctttgttttctaattaaattaccatattatattcatcacttgttcaactcaatatttttgtgactgtcatctttaatttcatcatccacatacttagtaactctcttaccaatttttcactctaactactctcttatagtatatttttattattgcatcccatttaaatatatcattaaatttatcataaaataattttaatatttttaaaataataaaaaaccaaagtataattttaaatctacttttaaattcaaaagtgaaaataagaagatgttaatataagaagacataaaactaaaatcaatatagttattaaaaaattaaaaaatatattaattttacttttttatccaaacctcattatttcttattattttttcactaaactcttatgaatgtatttttaaaattttatagaatccttttaaatctaataaatctataaagttttttaaaaaaataaattcttatgatataaatctattaaaattcaaattatcataaaagtcttataaaaaaatctgataactcataatattcatatataatctttaaattttataaagatttttttatactaaaataatctcttaaaaatttaatccaataaaacccgaaatccactatcctataataaaaaaacatcttcttgcacacgtgtctccctctcattcactctcaaggctaaaatctgatgtgtcactctgaggttaattctcagcttcagcttcttttttcttttcttttttttttcctcacacaacacacacacactcggggctgagctcttctctcatcagaatgagaagattcaaaatttgaaaattttcaaaatttgaatgaaatacacaaaagctgtctatgagacagagtttgcagcctactgtgcctattatgtcacctcgccgagctatggagctgaccaccaagaagcaccatttttcaagcaaatgcattcctcagttcttccatttttcatatttttcacttcacctcagcgtcttccaccagtgtgtgacaatagctcttcacggtttgttcctcaggtcttgcatttctgatacttttcttgtctgtggtatgttattactttgggaatcaccattttctttaccttccttgcttctggtattttagcttttcagcttggttttggtaacttcttttagtcatatttggttttctttttttctttttgcctctgctatgttacttcttgaatcgcggttgaaaacactttcgttgctttcggtttttttttttttttttgccgtgcttgccatgttcaatgttgtaatgaagcaagatattggctgacttctttgtgtatcatctatcaaacatttgtaaaactcttattttgtatgtgggctaaacctcttatttgtttgtgtaacttctgtggtttgttattatgttgattttgttgagtgatatattttacttatgatgcttttttgattgtgttagtcagtatatcagaaaatcatccagtgtgttactttaacagttcagttgtttttgactttttctacttctattcgtctacatcttagtgaaactgtctttgttatcagcctataaaatgttgtacatctttgttaatggactcacatacttacttatttgtgtatgacccattaaacatacggttttttttttcaggtgtccgtaaaaatattaaataataccagacttttaatctggataatatctccattttcaacttggttattaatggctggcggtaagtttttaacatattaaacaacaaatatttttttctatgtccataaaattacccagttgttatttgtgtatttggttagtagtatttcgcaggttgaattctataggcgaaattaatgattccaaggaaacttggaagattgctattcgagtgataaacatgtggactatacctagatcacctaagtctacgactgagcttaaactaattgacaaggaggtaaggatatgttgtgtccataatttgtattatgaaggttaaataatgatatacaatattgtggtacttaagtgttgtttgtacagggtgatcagattgtagctcagatgaagaatgttgatgataaagtgcttaatgtcaattttgaaattggtcaaacatatgtgattcaaaactttaaggtggaaacaaacagtggttagtacaaggctacgcgacatgcttttaaattaaactttgtaaaagcaaccaaagctacgccccatgatttacctgaaataccaaacacaatgtacacattcacaatgtttgatgccattcataatggctctgccacacctgattatttaataggtaacctctgttgtaaaatttgtagtgcattattaacctttaattaatttggtggtttaacataatttggtttttcctttaagatgttattggtgaggtagttcaaatttgtcagtggaatcttgaaggacagcctaagaaagtgattttcacaatgaaggatgagtggtattgattattcaaattggtgttttacctcctgatatattctttatgaagtctgttatacattgtctttcgtattatagtttatgttattatgtgtctcaattgtgacacagtggtagtgaaattagttgtactttatgggaggcacttgctgtggaatttaaggagtattttgaaaaagcattgcctggaccattcatattaattctgactatggcaaaaataaaggaacctagaggtatgttaccttataagtaatacatgttcaatgtatgcttcaatgtagttaaacattaattttatacttcctgatttaatgcaggcaattatcctgtaggaattcagaattcaatgtatggatccaaaatatttgtagacaatgatatgaaggatattttggaattcaagaataggttggatttttattttggttaatattgttatcacatacattgttgtattttaacatatttgttatgattgaacaaattttttcagaatggatccaagtcagttaagcacttatacatgttcccaaataggaagtcaaatgtcaggttcttcaatctatgctgtggcagatcggtttctttataaagcttgtgtaaaatctttagatcaacttgcccaattaaaaaaggtttgataaaaatttcagagtctgttaactgcagtttgcataaactgatttatttattttgttgaaggatgatgtttgtgtcactgttgctactatatctaaattattggtagccaatggttggatttatgatgcatgccctaaatgcaacaaaaaggttaatgcacaagctgagccttttatttgtgttggatgtggtaatgaaagtggaaagacaatgccaaggttagtagattatatataatttataatgtgtccataaaatacaaatagcttgacataagtcagaaattcagttttgttttttgtaataggtttcgtatagatgtcagagtatctcagcctggtgaaactgctatttttacactttgggatcgagagtgtgttgctttgattcaagaaactgcagctgacatcaaagagaaaatgattactgaggttatgctggctatatctatcattttataggctaattttccttataattcattatattgtaatatattgtaattgattgtaaaacattgataattgtctttgcataggaagggcaatttgatccaagagatatcccggaagctcttgacaatatactgggcaaaacttgtgcctttcgattcaaagttgttccaggaaatacacgtcattctatctctcagttatctgaagataatggattaataaagtctgtgcttgccaaactatcaacgtctacccttccggtatatatatttgtatgtgtgtttgtgtatttattaaatttatgcactcaagaaaccagttagtaattaaatctttttgtttttatttaggatgatcgtcagccttccttgtcatcagcatcccaaactaatgatcttcttgatagtgcaagtgatttgatgttttttttttagtttcattgtttttacacacaccagtgattcctgtcgactaattcaattcattccatggttggcttgcagcaatgcttctcagcgactgctgagtctgatccaaatttattgtcttcaatgacaccagctaagcgtatttgtaccaatactgatagccaattggatggcattccatttgaagatttatcacaaatcgaactatcttgtactaggatgaaaaaacatatcaagcaggagtcatgatgatgacgtgttattgaagacttgtggggtttttttgtttcttaggaccattgtattaaatagtatgggtttattttggcactttttgatacatttgtgttgtaatacgatgtgatccagacattatttttgtctttaatacaatgtacttattttataattatatctgcaatatctgcaatgttcacgagtacaacatttccagcttcttcttcctttctcagtttgcttccagggttatgttaaacaacagtctataaacttggtattgtacattgtgtatgcaatttataaatttagctgagttgacatcaaagaataattattgaaggcattcattttatttacaccaattgaatcggagctgaatattatattttagtgttgtaaatataagaaagtcatatgtttatgcaccatgactacatgactttttcttccaggattatgccatagtggaccagtatttgacgtgaataatattttacaccagctgatacattatacattgtattctataatattcagctattagtcttgtggatggaaaattagaccaattaaaattaatatgatgttcacgaaaagaaaaacaaaattaagaaagtacaggacaaggtggctataacctggctagaagtaagatatactgtcatgaaccattaatttggtgtgactatagaatacaatcagaaaaagtaagttgccaatggttattgcaggcaatgtcaactgacaaatgaaagctatgagtgataatatgagtgataatgtctcatctcattaaatgtaacagtggaagcccaataacctaccttgtccttttggaaacactttaacctatattgaaactcacttttacaacgtatggcaaagaaatagaacattcataaaaaacaatgcagtttgcagacaaatttatgaagaagcaaaaaatgcaatgcactgttgacacaaatacatagtttctcaagcttttagttctctacagcttgccttccagatactcagaagcatttttacataatctgtccacatagatactgagttatttgatattgttgttgttagttgtggtcatcaataacaccgtaaatgatgggattcacatcagtttttgttaatggttgagctgagcagcattaatagctctggtaagtccaggtttttaacaatgtttggtgagccttactcaaatgaatagtaaaggtagatacttagcttttcaatattataaacctgctattaacggtcataaataaatgtatgttttggcaacatacatgacaatctgcattgtttaatattatttgttgtggtcagaaccactatatttaagtagggctatcaattaatgtcaaaaggtacacgcacttaaaagatattgaaccctcacgtattttttgtgcaggccaaccttactatttgaacaattgcacaaattgaaaatggaacaagaagttttgaaaagaaaggctgcggcaaaagtggcaagagtgaaacggaaatttattatccaacacaagcatttatcacaacagagtactgaaaacacaggtaccagtttaattaaactgaatatcaatataagttatttaacattgaagtaaccagcttcttaattgtggcagttattatttttaatataatgaatcactctctgactttttcagctcagctatcagatttgactaatgctgcaaatgctagattaaccagaaaacttatactgcaagcaaagaaattaccaacaagtaaccatagtaatggtaacagaattaacaaagtgaaggaaacaacaggtttaagatatgtacactgataggcagaacatctgtgaaatcatttgatttcatacattggtgttattagtgaaacactaatgataaaagattttatttttcaggtgctgttaattcacctggaacaataggtcgggaggtatgtagacagattccattagccgatatcagtaatactcaaccacagtcaactgagctcccaaacaaacgatacaaaactttggagaacacccgttcggtgcgagcgaatttgctcaatcaatttcatgttgcatcttcaacttctactgctaataaccataatcataaccatattcactgtattgtgtccgaacgcagagttgagccagaagagcaaatacttggtaggggtgaaatacttgatggatacttaatattcctttgtaaataaaattattaacaagacatgctcataactgaagtataggaatattatgcactatgcagaacacagtcataattgggttcaaaatgatgatggtgtatcacaagaaagccagaattctgatcagcagattagctcaggtttgtaccaactacaaataagtgttcaaaacatcaattttgacacgaggacgtattaaaccttcatatacattagaaatgttttaatacacatagtcaaaatttaagtatacggctattgcggattatgcagaacacaatcttaattgtgatgatgatgatcatgtgctatccgaagaaaggtataattgtaatgagcaaattagcacaggtctgtaactctattcacagttaaaatagttagacatgaactgtttttggttaaataactgttatggattatgttagactaatgttttatttcttattagaatatcttgatattggagacccaattagtacatgtacgtattgcaaagcttgtatgtggtatcaagaaagtaagacaaagactagaagcaaggctaatgctaaccacagcctttgttgcagcattgggaaggttcaacttcctttgctaaaagatccaccgttactcttaaaacagctactatatgatcacaatgaaccgcaaagcaagaattaccagaaaaatatcagggcttataatatgatgtttgcttttagctctcctggtgccaaaatagataacactttattgaaaggaaaaggtccacctatttatagagttcatggccaatcatgtcatttgattggaagcctattaccaatgcctggaaaacaaccaaagtttgctcaactatatatctacgacactgaaaatgaaatcaataacagaattggtgcaggaaggtaaatatagctattttttaaagtgcataatttgacattttgcaaaattttatctgaactcacagtatgttatcatgtttagatggcaagatactcttgatcgacaacttgtgtcaaagttaaaagatatgttggatgaacacaatgttcttgctaaatcttttaggatggcaaaagacagatttaacatttcacaagcacaaaatctaaatttgactctgatagcagataggaaaaaggatggaagaatttataacctgcctactgtttcagaagtggctgcacttatagttggtgatgcgactcaacctatcaatagagacataatacttgaaaaacaaagtggccgattacaaaggatcaatgagcttcatccatgttatcttgcattgcaatatcctttgctatttccgtatggtgaagatggatatcgtaatgatataaaatatagagttatgaacaattcaaatgaaagaaagagagacaaagtaactatcagacaattgttgtcttttaggctacagtccagaaatggtgaagcccaaaccttattaagatccaaaaggttatttcaacaatttattgttgatggctatacaatgatggaagcagaacgtttattgttcataagaactcatcaaaagcaactacgttgtgataaatacatcaggttgaagacttctcaagaagcccataacaatgtcactaccatttgtgggaagcgtattgttctaccttcatcttttgttggcagtcgtagatacatggatcagttatattttgatggaatggccatatgcagcactgttggctttccagatttgttcctcactttcacttgtaatccatattggcctgagatccaaagagtcctttcacctcttaagttaactgcagctgatcggccagatattgttacaagagtatttaaaatgaagctagaccaactaatgtctgaattgaaagataaaaaaattttaggcaatgttatagcatgtaagttctgcactcctaactcagacagtcctctctattgtaccattgttttgtaaatcagtttaaccatgttaactttcgttgcagatatttacacaattgaattccaaaaaagaggattgccacatgctcatatcttgctatttttagctgctgacagtaagtatccatgtcctgcagatattgataacatcatatcagctgagataccagatgctattgaacaaccacaattgtatgaatgtgtgaagaatcacatgatgcatggtccttgtggccaagctaacagaaactctccatgcatgaaagacggcaaatgcagtagattttttccaaaaaaatggcagcctcaaacaattgttgagcaagatggatatcctgtttatagaaggcgaaatgatggaaaacaaattgtaaaaaatcagatacctttagataacagatatgtagtgccatacaatccaactttgttgttgaaatttcgagctcacctcaacatagaatggtgcaatcagacgacatccatcaagtatttattcaaatacataaataaaggttatgatcgaataactgctgctgttgtacctgtacaaaatcaggatggtacaacagggcaatcggttgatgaagttaaacattatttggatggtaggtatatttctccttgtgaagcttgttggaggatattttcatttcaaattcacaaaagacttcctgctgtagaaaggttgtattttcatttacctggtgaaaatgcaatcatctttgaagatgatgatgacattcaagctttgttgtccaaaccaactgttaaggactcaatgtttacttcttggttacaagctaattcaattttcaatgaaggaaaagagctaacatatgcagaatttgtaagaaaatttacgtatgtcgctaaggaaagacagtggaagccacgaaaaaaaggctataccattggaaggcttaactgggtccctccaagttctggtgaactgttttatcttaggatgttgttgactgtgattaaaggacctaccacttatgaacaaattagaacagtcaatggtcaactttatccatcatttagagaagcttgctttgctatgggcttcttggacgatgacaaggaatatattgaggcattaaaagaagcataccagtggggctgtggacactttctaagaaagttgtttgttaccatgctgatatccaacagtatagagaggccagaacatgtgtggtctcaaacatgggagtatctaattgatggtcttttgcataatcaaagaaaaataacaaacattccaggtaaaaaacagtgaattttacagttctttatactattacagcatgtattgttaaatactttcgttaattatatttttttgcatttagatttacagttgtcagttgaagacatgaaaaatttagcattgctccagattgaacacatgttacagtcaaataagaaatcactaaaggattttccgtgcatgccttttccaagaggtgtagatcatccaaatgttgggaatcgatgtatttatgctgagcttaattttgacaagaatcagttgcgtctggattttgaagcatactttgcaagtttaacaggttaggcaactaaattttagatacaaagctattgacaattacattaatcattccaaatcaaactgcaattaacatttgtagaatgctgtctgatacagatgagcaaaggcaggtttttaattcaatcatgaatgctgtaactagacaggctggtgagttgttttttttatatgggtatggaggcactggcaaaacttttatctggaagacattagcctctgcattgcgttccaaaggacaaattgttttaactgttgcttcaagtggtatagcatcattgttattacctaatggcaaaactgcacattcaaagtttgctattcccgtgcctactttggaaaactccacttgtaatatccaccaaggcagtgaacttgctgaactattaaaggcaacacaattgataatttgggatgaggctcctatggcacacaagttttgctttgaagcattggataaatcaatgaaggacatcatgtctatatctgataccagtaatctaccatttggaggaaaggttgttgtttttggaggtgattttcggcaaatcttacctgttatacctagaggcagcagatcagacattgtgcatgctactattaatgcctcttatctgtgggatgattgcaaagtcttaaaactgacaaagaatatgcgattatatcagaactcagaaatagaaaatgctgaagaaattaaaagcttttctcagtggcttatagatgtgggtgatggaaaattaggcaaaggtgatgatggattttatcaaatagaaataccatctaattttctcattacagacttcaatgaccctattgaatccattgtcaaccatacctacccacagatcaggcagaattataacaatgaagattatctaagcagcagggctatattagcaacaaccattgaggttgtcgatcaattaaataagcatgttttgaacattattccaggtgatgaaataaaatatttaagttctgattccattgacataacagatgctgctgataatgaggcttaccataccattacaccagagtttctacattcgttgaaaacgtctggattacctaatcatagaatcatactaaaaataggcacacctatcatgttgattagaaaccttgatcaagcagaagggttgtgcaatggtacaagacttattgtgtctagaatggctactcatgttattgaagctcgaataatttctggtaaaaacattggcagtttggtgtatgttccacgaatgtcattatcaccatcccagtctccatggccattcaagattataagaagacaattcccaattatagtgtcatttgctatgaccatcaataaatcccaaggccaatcttttgaacgtgttggattgtaccttcctaatccagttttcagccatggccaactttatgttgcattctcaagagtcaaaagcaaaagtggattgaaaatactcattcacgacaaagaaggaaaagcacaaaatataactaccaatgtggttttcaaagaagtttttcaaaatctttggtatgtgctcatgtatatttccttttatacatttgatgtttgattttcagctattacaattaattaatttttccttggatgcagaatgtgtcttctattctattacttatcaccatcctcacctggacttggaacgttagtttataccaattgtgacattgttggtcctggaatgcagcattacacttccactctgtatatcaccaccatcatcaggagattatatcatgttaaattgtacgaacatgaaatgtacacaactattgctatcagctatgtaaattttattatactgcaaaaagtggcttctgtcatacacaattttttgggttaacacttaaatagaatgaactgacagtaagtttatgcctttttaaggacaccagcattacacctaacaggtgagaaagtggctcctgtcatatgtttatggtaactgtctaaacattttctgttcttatcgcagaccatgttaaaaatcaaaatcattcaacactttttcctctcagcaatttcatgtatgacactatttgctagccttttacacaattgttgaatccttgtcacaatgatgataacatctaagctattttttgcacattatgacatgtcctggtgtgaatcataattaagtaactatatataattctgagcacattcaaatgtttaataatcttcttgtcatcaaatgctaaaccttgagcctgctaccatttgcctgaagccctgaaccttatcccaatgcaacatttcggccttactacaccattcttagtggattatttttaccacctattttcctaaatcactctgtctaacaaacacatacctgtagcttcagacagcaaaccaaacccgatgtgaacacatcacaatcttaatataaattctaacctattttttaaaataaattccaagcctagcacaatagttgctatatacttgattcaatttgaaggctacataagttgttctcctcaaagctgtgttgtctcacctaattgattttgccttttttaaaaaatcttttattgagcataagacttaatattttgtaagaaacaccaaatcctttgttttctacatcatatgtgttgggcctttgactctagcaatatgcatacagcaaaacttttagaaaacaccataccgaattgcccaactctctaccatataacttttcattaacatgatcaactttaacagaataaaattcttttacaaattaatatctaataagtttaccaattttgcgatacacatatgaaatcaataatatgaaatttctctcttggactaagggaagaataactctaaaaaataactctacaactattcattcaccaccaaacgtcacaacctttcaccgcacttcacaacagttcacaaaaaccaatagacaaagttagtacctttatatatatttgaccgttaacatcaggacgttgaaacacggaaccaatttattgatatcaagatttaaattgccttttactttcaatcaatttgttcgtaactcaaattttttattgctaagaccctttcgctagacacggttatttgcaaaacagaagttatcaaatggttacaatcaaataaaaggtcatttgcaagcagccatcaggaggacgcttaccaagaagaagacacaaaaacactatctcagactcagtcaatctcatatccaaattcaacagccgttgttatcaacagttaagtatttttcattgtactcctcataacaccatttatcctttcttgtatacaaatgagaaccatattcactatcatgaataaattaaaattttttatgttgttcaacacaattttcatgatttgccttgcagctttgcatatttacttatacatgatattaaaacccatattgtgtctcagacccaagttttctttgttcgttgctaactaagattatgctgtggctatcatttgcttttcatatttcattttaagaataaaattacattttatatcaatttttgtatagtggttctttgtcatgctttttcaatgaaaatctgcaatagcacaggtggataaagattctacccagtatctcattttcatatgctatttatgttggttcattcgtaattttagacaaacttgctaacaaacattaggcatattaatctttactgcaaatggctatatcaaacctcattattttaaaaatatcttaacatatccagtcaaatttttattcgtaaatttacaatcacaatttcatatttctcatatacatttctgttactcaccaatctttgctgcaggatctaccaagtgaaatgtattactttttgcgtgattcaagtttcagacagattacttttgcaagaacaagagcatgcaaagttatattcgatcatcaccgcaaacgtgctaggattggttctggttggaaatctttggttactgatttcaacatcacaccagatatggaattgatcattgagttccctaatcctaatagcaaccgtggatgttggtttctttgttaaacacatcttttgtattcagcttatcttttgatgcttggaaaaagtatgtttctaacaatattttgtttatgtatgtaactaacaaccatctttttaacgatactttgtttatgtatatatttgtttatattttgtgtttactctataataactaagactattatattttataaattttcatatgttcttatacttaacttagtttcacaagaattagctatttcaatacatggatgttaatcttagttttaaaaattctaatattagttttaaaaatagtaacgaatgaaacgctacaattaaatactttcgatttcttaatggagtccttaatttattattagcttatatatttagcaatttatcttttacattttatttttaagtttgcttatacaaaaatccttaatcattaaacattaaaaatattttattcaaatctagcataacatggcggagcgaagcggagccgtcccgtgcgtatgcgcacgggtccaaaacaagttagatgataaaaacagtgggcttggtgaagtggtagagagagaatcgcagatacaggttttgctgctcccatcaaaagggtgaaacagtaaattcaatacttatagcatatttaaaaatatttacttcttaagtgaaatatgtgatatgtggactttcttagaaaaagtaatatgcacatatattcattaattatatagtttgttgcttcttattttcttttatttattttacgcataattactgttttaactccctaatttagggtcttatttttttaatttaaatttcgttttaggctcttgccaagctgagaataatagatcgataatttgtgatgatttttaggttccataatttgatttttaattttaagctaccaaagtttgcattttaaaattatcataatcatgaaaaggattaaaaatggcagttttcaaaattgaaagattaaaaagaaatttagaagactaaaacattttaatccccaagttgagagagtaaaataataatgaagtctttctttgtatatatcatatttcatattatcattataactaaaattaattctcctattttttctctcttatcaaataacataaaatatctatgcatcgttattttaacaaaaatgagcaaaaaataggatgaaatataataagatatagaagttaagtaaaaaggcataacatgattttttgttcagtattaatatgcatttaatgtatccttttatgtttttaatatcaacataatatttaacaagttgtaactaaatatatattttatcttcaaagttcaaaattcaaaaactatctttttctctcaataccagcttaaaatcacatgcgttatactgatattaaatttaaacttcataatgtgtaatttttatattattataaattttaagctatcattttttatatttcattaaaaataattttatattaccaatctattaatcaattaattaatttttttataattaacatagattggtacatttataattaacataattacaatcaataatcaattataagtaacatagattatatataatatattaattaataattataataataatttgataattaaattaatcaactaattatatagtgtttactaatcaattgtatatatgagattatgtaggacagtataataaatatttttatatattaataaaatttaattataatctactatatgaattagagtatgtaggacaatataatttaaaaattgaaacaaaaaacactcaaatcaaacaccatcttatcttatttttttcttatggttaattacaaatcattcattttgtcattaccttcattttgatgagttaagttgattgtaattgtaaatatactcaatgttattaaactcatatgaaacttagacaatctaattcataaacaacaataaaggagtagatagagagagagaaaaaaaataaggattttatgttggttcgatcaacgtaacctacactcaaagggagacaaaatatgaaactatataattttgcacaaataacatataaatagtcttatgttatatacaaacacatcaaatcgtaactaaccaaaaatactatcctctcaactaaccctgaagggtcttgaattatacgatcatttaccaaatccaatatatgcttgaacttttgattagaaaacaaagtcttagtcaacatatcaattggattgactgttgtggctatttctttatggaaaacaaattacatacactcacgaaattcactcagcatcataggttgattttttagctaaagtcaatgcactatgaatatctcaacaaaaaatatgtatttacatattcaaacccaaatcatgaataagatcttataatttcatacatttttttttgtgggacaaacaggtattcgagacttcttatttaatactcatctaactctcctcctcccatattagaccatattaggataaaataatatttttaattatgattcaatgtccaaatcgaaaatcaaattccagtgattaacgtatcttcttcaactccttttgttaatgacatatatacttcacttttttggtagacaaagcaagaataagttaaatcattgctctccaactaatagcacatctactatacatgtataaaaactaactgctagcaaaattacaaaattggacatcctatatttgtgacacttggcaaaaattagggacaaaatggtaattggacataaatttactaactgcacccctttttaataagtgcactccagtattcccaaattaaaacttgctaattgcacttcctattttataagtgcactcaaatattttcaaattagaacttgctaattgcatcccctttttgataaaaaaatctatatttctttcatccctctcgcacgttatctctttaacacatagacaatcgtataaatgaataagaataagtaacattaaaaaacttccttataaattccactctttagatattgtcttttattatccaatattagtatacataaaataattattgaactaaaacatatagttgttgatgtgaaaaaataggttatagaatataaataataacatgtctcaaagattatccttacatcttcattcaaaaacaacagaaatttgtttacactaaaacttaaaaaggaattatttggtcacatggtgtcaatgaaatttttggtcttaaagtagtatatttttctttgtattgcagatttgcatcactcttttaattttggatctaatcactttgttccccaatatacatttttcgatccccatttggcctcaggtaaatcacaacacaattgaataatggtgtccataataaattccacaaaattgtcaattatacatttttaaaaaaaatattttttcaaacaaaaaataaataatgtaaaaaaatcgttaactgataaatcctaattgaaatgtatttgtcaatgtaagaaattgataattgcaccccttcttaataagtgcactccaatatttttcaaattaaaactttctaattgcaccccctttttaataagtgtactccaatattttcaaattaaaacttgcaaattgtttccttttaaatcttaaatactcattatatcattttttcatccctctcacacgttatctctttaacgcgtaggcagtggtattacctgtatacgcagggataatttttctaaattaaaacttgataattgcacatccttttttataaacaaattaatatttccttttaaatcttaaattttaattatattatttctttcatccctctcacacgttatctctttaacgcgtaggtaatggtattacatttgtacatagggtatcgtactagccagttacaaaaatacaaaaatttaagtagaagatcaatgaaatgttcaataaaatgttcaatgaaatgttcaattgttaaatttgatacagaacctctatgaaagtgatcattaacacaaacagaagtgaataaaagtaatccagttgatggttaagtagaagatgaaggttcaaagttaagaaaaggtgtaagacaaatggagagaaatgaaggtattacttgggtaaattgaaagagaagacctaaacaggtggaaagtttagtagcaaaacattaattttgtataaaattttcagttattttctttaatttaagttcataagtgaaagttgcttgctacatattacaattcttgcttagattgaaaattagtatttttgttccaagctaatttttttactttttctatccatcttatatctttatcttatagtgattatatgaattaaaattctaacaagttctcaatcagccatacattagtcatattccactcaaattatttaaattttcaatctttttgaaattgttgtgacccatcaattacatttatagacaatattaacaaaattgtcaagaagtactacattacaaattgatcgtcaagtgtctacaattatattacattatatctatatacctatttttattaaataatctttctttatgacacattcaaaaggaatgctaacaaacacaattgaatataaaagatacatataaataagtattataattttcattagtgtgtttacttataattgtcatatctttatattacacacaacaaatataatttcttatttttattataaattcatcattttcttaatttctaaaatatttatatgtttacttattataaaaataggttttcaatttgaaacgaatcgaaacccagcaaatcgatacatcccgtgcgaacgcacgggttaccgactagttattcataaataatgaagataaaaagcatgtttgggaaactggtgaaagcccctcaaacgtaagttgagtccaatagtattagaggaattaatttacaaacctaggtttgggatctcctagcggagacctaaacatgcacataaaaagttatatttgaaagggttctgaaaaacaattataatgaataacttcctaaaaaagaaaaaaaaaatatataaaataatcacaaatggatgagaaaaataaaatataaaaagaccatactctatttatcttcatttaaagttaatatataaaggaaaactccctacactggtattcaatttgtgttaaaatataatttatcaacaaaagaaatataaacaagtaaaaaataattatctttatttaatcacaattatcctctaattaatatttttcttatctaatcataatttttatgctagtgtaaatgaaaagactccttttttatataaaaaaaaccacttttgggctctgggccttggcccgacttaattggatcttgcactgtataaaacagtgttagttgggttattctaaacgagtgtatggagtgaacaatattttccctcctccaaggtcccaatttttcttaaaccctaaaacactctcactgaagaagctgctgcagaagagaatttccatttttacaaaatgtcgatgtcgaagagttccaagatgcttcagtacatcaactaccgtatgcgtgtcaccattcaggacggtcgccagctcgtaggaaaattcatggccttcgaccgccacatgaacctcgtcctcggcgattgcgaggagttccgcaagcttcctccgcccaagggcaagaagcctgccgaaggcggcgaccgcgaggaccgccgtacgctcggcctcgtcctcctccgcggcgaggaggtcatctccatgaccgtcgagggccctcctccgccggaagagtcccgctccaaggcagtcggcgccgccgctctcgccggccctggtattggccgcgccgccggaagaggtatcccacccgctcccgtcgtccaggctcagccaggccttgccggccctgtccgcggtgtcggcggccctgcccctggcatgatgcagccgcagatctcgcgcccgccgcagctcaacgcacctccggtgtcgtatcccggcggtggaccgcctgtgatgaggcctccagggcagatgccggggcaattcgctcctcctcccatggcgaggggtccgccaccgccgatgccgcctgggcaatttgcaccgccgagacctggtggccctccgccacagttccaagttccgccgcagtatggacagagacccatggggcctcccccacctggacagatggtgagaggacctccggctccccctcgccccggaatgccggctccaccaccacctcgccctggcatgccaccgccacctggcagcggtgttccggtgtttggtcctcctcgccctggcatgcctcctcccccaaaccctccaaatcaacagcaacagtaatgggagagatgattggtaggtttgtatttgttgttttgttcaatcctctgtttatgtgtttgagtgtgtgtttgcagaattgagtgagtcagtgagtgtatgtgtgtgagtgtttgagtgtgcgtttgtaaaattgatttttaagttatttatgtttgattgattttactataatagctagtttgatgtaaaatttagtttaaatttttcaacatcaaagttttaaattgctgctgccatcgcattccttgatattgttggaatttgtggacaagtctgccacaattgtggccatggacatctcaaattaactttgaccttgcgacttaaatttcaaatttattttttatcacctctagtctgacaatgaccaaatttgtatcttttctaaaaccatggttgacaagaggcggaatcaatttgtttaccatccactgagcatccagacacagattctatgttttatgtgtatcttgcactcttcctttttgtgtgagagatagtgatgtctagaaggaaaattaaatggtaaattaggattaagatgagatcatgcattttgtaaggaaaaactaattttgttatcataaatctctcctttgtttttatttgtaagggtgttggagccgggtgggtggctattaataataccaactcaaatttatgtttgggcatgaagcaaattttaacatcaataccttttagtcaagtttctagactcattaggatagctatcgataattcgacatgattgtgacttttgagttgcagagtaaaattatagtatgctgtttgccataaacaattttggaatttacctttttatatactgttttaagagaagatatatatgtatattgtatgtgtttgtatacacatacgttcccacccttttgcctttccatcatgcatcatctttatttgtggccagataagtgctaagctggctttcttggtgttttattgttattcctgttggtaaatcatcaaggaaagataactttcctgcaaactagtataagctatttgcaaacgctaaccaaggaaattaaatgctaactgatccaaatggtggtaaggcaaatgtgtaattctttctgttccctttacctttgtaaaggagcatgctttagcatagttgtcaatagtgccaaatagtgttgctatcccgtgctcgcaaagtgttgtggctggagcattttacaaaaattgaatagctctgcagtcagtgttatcaatggtggatggctgaaatccaaatttctgctacataaacatgccattgcaccctatggtgctgccatagtgggcttcccttcacattgttgtctatggtggttggcaaaaaaaaagaaccgccatggcggccttggcgctgccaaaaacccatccttttctgggaacatatccagtatttctcagcattttctgtccagttggccatccccaacatctgcagcctctgctctgctctccatagtttatgatcatccctgagaattatgcggccatttaattccagcgaaatgtgacctttgctgccttgctttgttctgttcatatgttctgtttttcaatccctctaaaacaggtattatcttgtattctaactctcctcaaagtttatcctttaatctttttattctaattggttagaataaaagccatcccgcagttcagctatagtattttcagggtctgcctctcagccaatatttgggattgacaactatgagaactgcctattcttaatgttggcaaactcaagagtctatgtaaaaatcatgttatagtcatatatgagtctattttatagtcttggaacatccattgacttgatattggaactgataagagtttacttcataaaaaaacctatcatagattcatagtatccaaaaataatttaatagcatcaccataataaacattcatagttccgactttttttgccattgccctgaatatatgccccatgcctccaccctagatcagtcctattttcaagagtgttcatcctagtttcggtagctacagtgttgcttgatttgcatcatggtaatggatgagccgtgaactgtatgtttcaaatcaggccaaaaatgacaaaaagtaaattttgttacgtcaaaatactgtgttttgggaaaaatagatgtcacaggacagtagattttcaggctcttggacttgagaatttatacatgtctacccaatgctactcactagactgccttttggcgagaaattacatgactcaagcttgtggactgtcagattccctcatgaactagtgaatttatgcacgtctaataaattcttcttaaaaaaaaaaaacaatgtaactcaactggttttcttgacttgtgagtttgacaaccatttctatcatgttcaaattacttttcactgaatcaatgtatccattactgttgacatcttaattactgtccaatttatatatttattttattttaactaatgatttagcatggttgaggacattgcttctgtaaccagcattttagatgttagtggtctattgtctaaaatatatggtgatgatatggtcttctatttgatctatgaaatatatattttcctattgttttttgtggttattgtctcattgtggtctgtatttgtgtcccatccttgtctcattctatgacttgaattttaactgctctaatattatttagcttcgaaacatcaattttttgcgttccatattaaacttaatatagtagaattatgtaagattcttaacaagggatttatatggcttttctccatcatttcctgtgtattctgtctcacttgtgaaatcttttacctttgtcattgttggactgcattcttttagcacattcactgattatttgaaaattatcgtgattgctcttgattgagactgactgaattctgcttgcatatagtaatagagaacttcaaattattgtggcaggtttcttactgttaatctgaagatatggactccgagcttcttgcacgcaattcaatatccagcttgtacttgggaactgattgtcttgaatcactctcttcttagggattgtttttctgatgtcttgatgagaatgtgtaatgttagaagaacaactttaagtattggagggagttattctactaaaacctgagcattagacatacaagtcggctgtgtagattttcaggtgaaaaatgccggattgcatagacagcgttctgatttgagtgtaggacaagaccccccatatcatttgggttaatattacataattatgactttgctaatgtttctggatcattttattttttattttctgcagttatttgcgctttgtttttcttagtgtgtatataactatatatattgtggagacgcaaatgtaataggaagattaaccaggaactcggtggattattaaaaatcggtgatgttgacattctaacatatctagaagagagaaaaaagagaataaaaaatagatattttggtcttttaagtagtttgtatcgagtaataaatcataaaaaattatcccatccaataccacatttttttttccaaatcaaacaaaccccaagttaattgaattctaactagatattccacacagaaaatatacccctaaattcgcagtattcgttgcaattcctgggttaagaaatttttaaccaaaactatgaggattaaaagcaagacttaaattgcaaataaattaaattatgagcctaacattactatttttttaagtgatagatttatatatattttatgacaattttatgtatgcatatttaattggagccaataaaaatgtaaaatttattatgttgtcaataaattataaatcgccatataattgaaaacggtttatttgtgtgattagtattttaaaagtcataggattttatttgattgactaacgtctatatcaatcaatagtatattaaaattaattacttaaatcctctaaaaaaattaattaattaaaaatacacttataatatacttaaaattttccttgtgttgccaaccaattacagattgccatatcatattatttattataattttcaagtcaataaatattacttgttttaagttatcaatattacttaaaatgctatttagttattaatcaatacaactttttttttacaacaagagtaattaaaatatatttttttattttattttataaatggcgttccaccaagctagtttataattaagcacggcgtgaacggaaaaacaaaaccctttccgatcccatcgctttcttagtttctctccgtcttcaaatctagggttcctgcaattgtagttgccgttaccaccgtgaaccaccgcgaacgccaccaccggaatagttgccgccaatttcaggttcgttctctctctctctctctctctctctctctctcctcgttgtttgtatattgattggacgattgatattcttcgttggtaatgctgtgattgaaagaccgagaaggatagaagtgtgtttcaagaaattgagatgtaagcaaactagaataggataccgagccaaagatgttggaacagagaatgcttgaaaaaccattgatttattgttgcatcgtgttgagaatcaaagtaaagttgttttaatcattgggttcctctgggaatctttgccaattgacgatgaccttcgaccttgaaggatttcaattaacgtgtgagcgaaaaagtgaagttgtttattgtatactaatcaaaactttattcattagctatttaacgtggatgcttgctccaaagtactctgcttcttgttttctaatgctttaagaattttagcttttgttctaatgctgtttttgttgtgttcttttttgctttataacgtaatttcagctgtaaggaaacagtgtgtaggattactgataacgttttgtttgatctgaaatgtgacatccagattcgtgatgggaaaaaatgagtttctcacacctaaagcaattgccaaccgaatcaaagcaaaaggattgcagaagcttcggtggtattgccagatgtgtcagaagcagtgccgagatgagaatgggtttaaatgccattgcatgagtgaagggcaccagcgtcaaatgcagatttttggacaaaacccacacaggatagttgagggctattccgaagagtttgagaccacctttctggagcacatgaagcgcagtcaccgattcagccgtgtggcagccactgtagtttataacgaatacataaacgatagacaccacgttcatatgaactccactcagtgggctacgcttactgagtttgttaagtacttgggtcgaactggcaaatgtaaggttgaggaaacacccaagggatggttcattacatatatagatagagattcagaaacccttttcaaggagaggatgaagaataagagaatcaaggcagatatggtagatgaagaaaagcaagagaaggagatcaggagacagattgaaaaggctgagcaaatgatgcagccgactacttctgaggctgatcagccttctcaggttgagcctccgagggaactgaatatggaagatggaatcaagataggattttctcttgggtcatcatcagctaaacctgtggtcaaggaaaaacatgaggcgtcaagggtggtgtttgatgagggtgatgaagagaaatataatgaaaggaatcccagaaacaatttgaagaggaaagaaagtggaggtggaaaatctgctttggatgaaatgatgagggaagaagagaagaaaaaggaagaaattaatcggaaggattattggttgcatgagggaattgttgtcaagattatgagcaaagtcttggcagagaaggggtactacaagcaaaagggcgttgtccggaaggtaattgacaagtatgttggggaaatagaaatgcttgaaagcaagcatgtgctcagagttgatcaggcagagcttgaaactgtgattccacaagttggggggcgtgtaaaaatagtcaatggtgcatatcgaggatcaattgctaagctgttgggggtggatacagataatttttgtgctaaggtgcagattgagaaaggagcctatgatggcagagtacttaaagctgtggaatatgaggacatttgtaaagtaccctagtgagtttgatggaattaatgactcaatggttctgtttattacatgaattgtagtattcgttcttatgtttctttctctagcgtgtcatctttgtagcacaaatcatatcattatcttatattggatacaattcttggaaatttatatttctgactataattaggcccctaacgtgcaataaaagatggtggctgagaaggctgaaatatcatgttgcaggtgcaattagactacagttttattttgtagttttgtggcgagtaaagttgaattcttattcttgccctttgttttctgtttctttgaaggcttagtcaacaacaatcaagttttgattttaactgggagcctgggtggagtcaactacttgtatgaaatgacgccaatttattttatcataaatcatttttaataaacacaagttgcaggtgtcaaaagttaatctctgcttgccatataatgtttaattgaaatgcgattgaactctctgctcccttgtttgaaaaggctacatttttattaataacagacagaacaatatccaagcacaaggagtgtttaagttttgggacaaaattacttcaattgataaaaaattattccacaccagaacccctgcatcccacagcatataaaaaccacccatatctagtgcgttagagatgatgacattgcgttccataattatcattcaatccaactgtaaatgctcccaaagtcctattgcaatgaaacaccaaattggcacaaaccatatattgagtcagatattatgacatccatattttagtgcacacaaattggcataaacaatgcagcagccaaagttctgctattagtcacatgatgaatttcctacgcaaaggaacattaaaaatagatcgccaccgtacaccatgaatcaccttatgttggctgtgaagataatcagcatgagtagccacggggagcttcctcaaagaatcaagctagctaagaatattgattcatttgcttttctttctttttgttgagcaggagcaggggcattggagcaagagtgattcagagtacacacattggggattatgcaaatcttgcagcatctattaacaaatattatcaagaaaagaaaactttcacataggtggcctaagaaaactagaaaacttttctaaagaatcacaactcaaatctaaatccgcgtggaagtttttattaactaatttgataaagctgcaatatcagtgtcacacttttcgtttattggtaagttaaactgtttcacttgacactagctaaaggttaaaatattacacttcaaaaacaatttgtcacaagcatcacatcgcaggttttaataatttgtattgatcacaaagctgcaatcatcgtttccattttttagtgtctgtttaagtagtttgcttctattctgcattttgacttaatggtctcagttgcttccttcttaatgctcacaacaaatgttaggcttctacagttttgtctcgagtggttaaatttgattatttgaatttggaagcacagatatttataccataaaacaagccacgttccagtatttacccctctagaacataaaggctttgatctttggaaatgaaaatatggttatgaatttctttctattctattattattattattattattatttactacttactagctagtgtttggttgttttagaatttttgatagaattgattttgaattgttaaacaagtatatctaaattaaagtacttttatactgttattttatcacaaatcattaggatgagtttattgatttttactataactatcttgaaagtcgtgcttagccattaaaatgattatctttagttacagattttatattaaaactcatgtaacgtgtgagatagatttgtagtgacaatcaaataagcacttactctatgtcagcagtgtattctgtgatattctgttcaatgcatataggtatatagaattgcacagcttcgatgtctttgtactctgctttatttcttgtcttagttactctatactttggccattcattcagagaacaactttcacccaaaaaaaattcagagaaaaactgttcagaattcaaacctgtagccacggacaggcacagaggggttatcttgtttgtaaaattttccatatatatagtacgaattgtttctgcacgaatgagacaaccaggtgggagatattttcattggtttttaataaaataaaggaaaataataattatggagaataaaacatgatattaattaagaaagagtatgcttgtatttttgttttaaagtaaaaaaaaaaaacctactaattttatttattgttatttattttaaaattttcatagtaaactatgtaattatatttaaggtccataattttttaatgaaaacaaaaagaaattaaacatacactatataaatgataaaaataatttctttaactaataaactgatatttaatttataacttacttagtattaaagtgacacgcaataaaaaatcatcttctattacattttttttcattttatattatattattttaatttttatgggtaattataaatttttgtaaggttttaaaaataaatattaaataataatgataataataaaacaatgccaatcaagggtacctaaaattctaaaaaagaagtactacagactacagtagtctcaaactgatattttgggtccaggtgctatggtggcatctgactgacattatcttcagttcactaagatatttagatttaatgggccccactaatgtgattttcttaaaaatatcttccattcagttgtgactccctctgcttatattttgatactctgatgctggtgccatcctgcattatctttttagctcaaatttttgtgaagcatttttattggtagaaatggagagtgagcccgtgaagcgcagaattcacatgattgctgctcactttgcacccaatgatgatatttcaactaccaacgttctgcctatggtaacatattatgttcttttacttatttgttcatggctggttcatggttcactagataatgatggaaaataaaggaattcatttgaattcagttatgtttttctcgacacatgggaattatttgggagttagatatagctaagtggggaaattgaacttatgtttctcatcttgtgctaactggcccttgttctccttttcatgtgaacagaaaaaaccatctaataggaatcttcatttattgtcatcgtaggacaatcaaactgcatataatttgagtattgtataaagtggactagcacttcattttttagtggctaaaggatgaaagtagctcgactgctcattggttttgaatacgagaaaatatgccctttcatctcatacagctagctttgaataaattgggaaatatcacctattcagtgtctgattttctatatatagtttaaccccgttgatattgcatatttgcgttaaattaggagacgtattagcttgtacagttgatgtcactatttattatgctaaagtgtttattgatcttgatgttcagcattggaaatttaattgtttaagttgcccttttcttttatgattggcttaggcaataataacttgaacactcttatcaaatcaatgcatttttgtaggctacaagcaacttcaaagtttttaaacttaagtgtttccttcatctttgtccctttttgatatttaaaagtgtttccgtaattcagaatttccatgtgctacacctttattatatgtttttagtagaccattaatttggttttatagcttttgttttacaatgtctaataaattaatctgtacgtactatcctttttttttcttgaatatttgtttgtaattcattttgttcatcaattttcctaccgctatcagaactgcagtggcagtctgaactctgtactccggagatgtgataataaggtgtattttgcacgccaagcttcttcttctcttggttattttatgaggcagacttcaattgaagaggtacttaagtgttcttattattgaaatacttaacagtgttcgatttactttttttgggtaagtgattcatttctcactggcttatttaatacaaatacactaactttcagggtggctcaacttcctttattgctcctaaaacaaatcatggtgctactgcatctgattgtctttctaatgcaagagcaccatgttttgctagacctgcaagggcagaatcagttttcacaaattcagtggtccaaccaatggctcaggagcagggctgtgattttagtacacttgatcctcctacatttgctaggccaaccagacagattagaggagatcagttacattctgaaaagaaaacgtgctattctgaaattggtggttagaactttgaactcggaaaggcatttgaagtaataatagttgaatagctataagaaacagatcgaagtatattattttgagtttaatttatatgcattgttagtgtaaatttttttatattgtcaacatataagaaataattattaatttgatttttaaggtaatattgtaaaagttaacaaatcacttgtgattgaacgaacatgaaaaaaccaatcacaaaccagtgcatagactatgtactctgtaatttttgtgacctttgttttttgcaggaattgagtggtctccaaggatggatgttgcagaatcagaaggcaaatatgttatcacagtggaagttccaggtgtcagtatcagtgacataagagtggaggttgatgaacaaaagtaagaagaatctctaatatacacccgcatattaattgtaatactctttgcaatttgtggtattaagcatttagttctccctaatcaatagaaaagggagtggtgaaggaaaagataaggcaaaacaaaatattgttggatgctctacttttgtctatgtcattattgtgtttgagtttttctttcatttgtgtaccgggggagggtcttgtctattaatacaaactttatacattatttctgcattgtaatataaagcataaattctggaagtgaaacgctaaatgtaaattttaatgttggacattcgtgatcatagagctttcgtagtataggacctcctttctttgtgataaaagagccaatgtgtgaactgtgacaggttgtgtgttaaaggtagacgctctactagcttttggacagttgcaggttgtccaaatgcttccttttcttcatatcatcggagggaaatactatatggaccatatggggtggtctggccacttcctgcgggtgtgaacaaggacagaatatcagctgaatttttgtaagttatatcttagtgttatgcacgtgtctcttgattatagcctcatattttaactccattctcaaactatatatatatatatatatatatatatatatatatatatatataaaacctcatctaatttggtctattgcattatttaattttttagtaactttggtttctggctcagtcacaggactctcaaatgattatattactaacaaagttcaaactggaagtagtaataaaatacctaggtacctaacatacattaggaagattttggctgcaagcgatcacactgctaagccaacaataccaggctagtcattagtgatctcttttactaacacaaaatggagagtcaaattgtaaccttgaagttcaattgagttcactgagaaatttattggatatttaatgttctgttaggctaaaatagctgattcactattgctgcaactagctactgtaatgatggccatcacttttatactgttttggtacttagatcattatggtattttaaatacaaaaaaaaaaaaaaaaaaaaaaactgaatctatgccaatcctaatgctttgtttggcagctagaatactgccatgatgattcataaaattttcaactcaatgtaaaagctatataatttatcacatctactcaaggggaactctttcccctacctctctcctctattctgctctgctgaaaactgaaaagttttccccatatagcttaaaataagtgtactttttttgttttgttttggtttactgaatttgtatgtgacttcatatcattttattttaaaaaatatgcatgcatggggtcgaaagtgacttgaataatttcagggactagtatgtgatgtgtgtggttttgcacaagttcaaagatatgtgctgtacctataaacatttgaagctgataatttgttgtttctttccccattttcagggatggatttctacaaattatagttcctaaagtttgagtatgactgagcaatattgatttgtagcacatatatgtatacgtatacctataccccgtgcatatagatggagaagaaatgggcattgttctgcatgagccatgtcatgccgtatatatatttgtaatgtaatgagcagatgatgggttaattttgatttcatatacaacttaaattgttgtgcagaaaatgtcctgatgcatcgtgagatgttcattctacgttccacttttgaaatctaatttattaagtcattaatacaccataccgtacaaaatgatacatagaacattgagggatgaatctctgtaggagatgattaaactaatcacatggttgaagtcgacttccaagtatcaatcatatttgataatttcaaacaggtctctatgctctcatgcttctatctgaaagggggtatgattctgaaactcacaaagttagtatttattatttatataaaagaaaaaagaaagtgttgaaaatatctaattaagagaatgatgaattttagtttataatataaataagaataaattcttctataatttgatgtcggtgtcactgccatagccaatgacaatatttattccttcaacgttcaaagtgggagagagcaattgcaacagcaccgatcatgcttattgctcactatttaggatgatgattgggtttagtttagtaggatcatgtagtctttattcatcagatttctttatttttaattaaaattacattgtagtgtttctcataatattatatcatccaaaattgtttaatgggtgacaattttataattattagtcgagataacttagataagtgatgtctcatttgatatcatgtgatggtccaacctattatagacacactcacatcataaattcaaattaaacaaccaatattcacaaactaaaataacaatgtataaatattttcttcataaatttatataaatgataaaaaaattaatccaataattaaaaattaacaatccactaaatttttaattgtgaaaagaagggtcgataaaaagggtaaaattaatcctaaacctaaagtgcaaaaaatcatcatcaatttcatattattaactgtagaacgttaactttaacgtaacgtcccacttcaaataatctttgaatctttaatgttaacttgatcttcaaaaattataatttaatattaaaataatccttaaacattataacttaataatatcagtccacaaaatagatatataaattaaaattaatgttctacacaacaatatgatattttttacacactttttttatattttcatgaactatttcaaaaaaattgtttttccaggaattaaattatcacccccttatattttaagggactatagtggttacccgtcctttaaaaaagaagatgtaagggaaaggtagggtattatagtttagtatatttcaaagaaaataagttctgatcttaaataaaagagatgtgaaaataacatgggccatgagaattctaaattaccttattgggcctcgacttataaaccaggtccataacatattgtaaacgacattctcgcagcttcgtctgcaaatgaactataactttacaatccgtcaatttacatcctctgtaaagtattaacaatttttttttatcccattattaatacgaaatatctattaattttatagataattaatctacgttaaaaaatttgatcaatcatcttttagtgaattttttttctctcaatcatatttttttattcataaaactcaaatccaaaatcttacttaaaataacataattcaaattcagtgtcatttgaactattggataaagaaaatcttataaccattgttctgcatttatgcttaaacgagaaagtggatggatgaggagttcttttttttcccattttttttattgatgagctctatccataatttaaaaccaatatgttagcttagattaattaaaatattatcactcaaacaataatcatcatactcaataagttggatcaggcctgccaaattgattagaaatgaattgactcgcttatcctatattttatataacattacttatttaaaaaaacaaaataaaataaaattagtactgctgataaaaaaaaaaaattcattaataatgcataaacataaactgtctttttaatttcaccatttcaattaactttaatttaatattatatttaggggtgttcgcgggtcggtttggatcgattttgatcaaatttaggacccaacctaatcaaatttgatcggttcagttttagaaaaaaaattgaaacacaatccaacccgctcatgatcggttcgattcggttcaatgggttacccattttaatttattttcttagaactactattttatatcatgattctttcaaatattcaatacaattaacacaatattatcaaatatatgaaagtagtaaattgattcatttaataccatcaacataatattctaaaatagacttataatataaattaaaacaaaagattcttgaacaagatttaatataatagtctgattcacaactatttcttacaaattgaactttgctataaccaaaattgttgtaaccagatttgctgaaacaaacaaatgaacagaaaatgattcattaatattataaacacgataaacaaaatatgaaaaaaaggtgaaacaaataacaatatacttgaaagtaatacattaagaagtttcaacacttgcagtttcaacacttggagacccaatattagcagtatttgaagtcaaaccaaacaactctaaaaatttaaacacaaccccgttagcacaaaaaataattgatatttatacaaatataaaaaatgaaataagagattacacacttgaatcaatcttttccgcttcatttatttcaatttgcaagtcattaatattttgcttagtaaatctaagccaattttggacacaaataagagtttcaacagtagtaggactcaaggaactacgaaatgagtccagaattctatcccctgtactaaatgcagacttagatgatacagtatatacaagaatgaccaatatatctctagtcatataggaaaaaatataatatttggatgttttcaatttccaccaattcaaaatgtcaaactcagggtggtcatcttcaacatcatcctccaaatacctatctattttggacatccttccccttcactagatatgagatttaacacatatgaagcttcaacatactcatagagataaaatgcatgttgcagcaacatctaacatcaaataagttgagttccactagttggtacatcaagtattaacatggccttagtggatatacttacttcttcagcacacctcttaaaacttgcaaatctacttagagaagacttcacaaacttacatgcaactcttatttttctaatggataggtcaatttctttcaatccatcactaataattaaattcaaatgagcagaacatcgcatgtacatgaactcaagtattttattagaagtgaaaagttgggcttaatattatttattttaaaataaccaaaatataagtatactatttatctattaaaaatttgttgtgctacattactagtgcctaaaattattcataattttgtccgaatttagtaacaaataaaatgttgtttctattaatttttttggcaaaagaaacaaattaattgggtcatatgctaaactatgggaaaaaaataatttttaattttaatatatatatatatatataaaaaatttatattattatttacaggttcacggattgggttaacgagtcaacggatctataaatctaaatccgtaacacaatccctacattatcgattttgatcggttcggttcgattttgacccaaatacataaatgacccaacccaaatagtttagatcagttcgggttcacgatgacccgtacatgtaaacatcgcatatcctgttttttaaaatatatattaaacataaataaaaaatattttttttttccattcattctaattatatatagcgctacctcgtagttttatgcatcggtataacagaaaacagcaatatatatatatatatatatatgtgtgtgtgtgtatgtgtgtgtgttttttgaaatttaacttaaatgttacagcccagccattcattattggtcatgactggcttcctgtaacaagcaaatataattaatgttaaataccagtacgacttctagaaatgataaatgacgaaacgataataattcattttaattagtattataaaaacaaaaattcgaaatagcgcgtacccaatgaatccacaagaaatttagagctcgaagtagcagtttaataatttaggtcaaaagaagaagcatggtagtagttagtagagtccaaaatggaatgctgcatttgcagtactaccaagttaagctagctggcatagcagtgtacgtagtggcagtcaacttcatgcactctctctcgataacaaacacactttatttagattactgcacgtacgtatgaatacgaaaaatatcaatctccaattcaataatgcagccaaggtcacaacattaagtagattagtgctgcccataatttttttttaaatcgaaccaaatcactctattaaaatggtttattttgaacaaaattgttttcatcataaagtggctagtttaactttaacttggttcggtgtttagtttagttttttcttttcctcatacgtatcaagtttttttaaagaactaaactgaattactttataaaaatagttttggttcaaacttatagatcatttttataaagtgattcatattcaattcttctcaaaattataatttggaatggtcgagttagaattgatattcttttcactcacagggtacgtacgtgagacttcattgagcattaaacattcagtagcctctttcttttgtattttattccttaaattaaaacgcgttctattctatttattttctgcctctttcttttgtatgtccccacacgctatctccctttcctccttaattccaaatttccaatgcaagacgacacaaaaatgttactttctccttcccttggtccgaactccgaatcattatccttctggtagctgttgagagttatatgcaagtcattattactttatcaagaatcacaagtaggacattggaaaagaaacagtgcggattctgaatatttttgtagatgttgctgatagagagagtcctcgcgcggtgttgacaacccttcgaacgttgagacataggaatgtctctacttaacatcaaatgcaagcaaacgaaggtggtcttcaactccttttcatacctataaattaaaggtaacatttcaagcttcaaaccctggtcaaccactattagctagctataaatccatgatactactactagtattgcaatagctagtaaaaaaaaacaccatattaaattttacctttcaggtagacatttatacgtatgtgtgggaggggagttaggggtcaggctacaagtcatcggcaaatttaaaataattcaaatcaattcaaacaatttaaattagatattttttgtgtttaggtcaaatccaatctaacttattcaagttcattgaattttggattgaattataagtgtaatatctagatccgcttatttgttgatccaacctattgacccgttaatttatattaagttgttattatatatatatatatatatataatatttttaaattttaaataatcaattactattattataaaacttatagtaattaagagtgagattatttttctcagttctcatgatttcactcagacactctcacaaaattaggatttcaactcctagctgctgatagaacatctattttgcttttttttttatttgttttaaactattttagatttagttgaaatttcaattatactactcatggtttgataatttgataacattgaaattttcaaactatactgtaataattttagttattgaatttttaggctttgtgagtgtgtttcttaaacttgtttattatatttcaatttatatatcatatttaatataatatattagcatatgtgatgatgagacaatgtgattcctctctttatcttttcttccattatttaactacaagtaataattataagtaaaatattcggtatttcatttaataaagattttagcttataaaaatattagattttaaaaaataatagacaaatttaaatgatttgacctgttgacccaagtcaaaccatttataaatggattagtttggattgagttttattttttttcttaaaaaattgacttaaatcaatccgttcaaatttaattaaattgaataacaaatttcgtcaaactcaacccaaatcaacccgtgtacaccctaaggggagggttggttaagtttaatttaaatatttcttttaatttataattttaaccatttatatcactttcactcataaaaaaaaaacatttaatccacatgcgtatcccatcccatttattttaacgatgtcctttgttaagcataatttactatctgtatttaaacattctttgatgtttggaaacttaaaaagttaaaataaaactataaacaattaacaaagattggtctaattgataagaaataagttcatatcacaaaaagacgtgtggatttgattttcattcttcatataaaaatcttgttgatgaataatttgtaagtaactctataaatgttcttaggacttatttaacattaatgagaaatccaacttacctaaacttttcaatagaaaaaaaaaacacttcagataataaaactatatttatctttataaatacttttgcactttttttacaggaaaaaaatacttttgcacttgtcgattaattatttaaaaacttaagtattaataccttatgatgtttattgtaaagtaataatctcctcaggagtctcaatccagcaatgataaagctaggttgggaaaatgccaatacttggcagttatggttccattaggtcaaattaactgctcaatattttcttaattgtaattaattttcatttgtttttatagattctcaaattaagagtattgctacttcataaaatagaaaataaaaaatcgatataattttttttactggaaaaatcgatttaattaaaattataaaatattggtttaacttaaattaaatttaatatttttcaaccgaattaaacttaaataaagtttttgatgattaatttaaataattttttacctcgcagttgcttaagacttgaacttcccctcccaccgagccgaaagatgtttggagcatggactttgaccacatcgaaatggctgaattacggttgcaatggcgtgcgaattaaagaaattcttgcacagaattatctttcattacctccaaataaagaaactatgtgattgccaaaataaaaaatatataaagaaattcttcttcttttaatcaatttttataatatagagataaataatacattttagaacaaaaagattttgggattatgatttttttaatatgattatcatacagtatcttagaatttgaatgtattggacaaagaatgtgaaatgtctcctttttttttatatttcttcaagtgttctaatttatagttccttgggagcagaaattgttaatcatgcatgtcttggtcatatacgcttgcattaaatgtttggaaacgtttagacacatccttttatattagcaagttttttttttttttttttaataacaaacaacttttttccctttattcttgcattcatagcattgcaatgttccctaaaaaaaaggataaatactatatgtttttcatcctttcaaagtagtagaagttcaattttcatttttttaaaatatattgtcttattttagttcctaaaaatttaaaacgtattaatttttgttcaaacatctaatattagtggattgttgttgtgactaataaagttccatattaatattgtattagaacatttttaataagaatttatagaagaattttttaagtaaaaaatttgtttcttattatagtttcttttcattggaacaattttactcaataagaagagtttatataaaataagattttgtatcttatgcaagaaattatttcttaataataaaaataatatttatctacacataacaatactataattaaattataattaagtggaaaaaatataaaaatgtgaattttttgaaaatttttaaaatttcttaccattaaaataaatttgtgtatgaatttcttacgatgacatgacattataataaaaacaaaaaaaatactataaaaatcataaaaaataacttaaaaaactcacttaaatttttttcatcaaaaatgtcgtcagtgaacattttgaatgaatatctgtcatgtgtcattcacttcggtacatgattatcacatatgacaagataattttttttctcccttaaaaaattaaatttgattttaattactataaaatttataagtttgggtttttgtcctcataaaatattatatttttattttataagtttgatttttagtcctcataaaatattgtatttttattttaatataatatattatattaagaaaaaaacaacataatattcataactttgttaggaatgaccatggatgggttgcgacagatatatttttgattctacgcatctcaaaactttgttaaggatatttatgtaagtttaaacccctcgattaaaacccaataatagatgggacaagatggacgaggtcaacttgatttattaatgtaatatattactttttcaattcttagttataaaatcattttaattaatttatattttttaagaaaatgattaatttaattaattacattaaatctggtaattcattacagtatcattataaaattataattttcttatctctaattatttaattattttcattaatattttaagagagaaaaattaaggatatgtaaaaaaatttaatgaatctaaaaattagaaaatagttttataaaaaaagacaaataaatttctgaaaagtatcttataattagaaatgaaggaagtaatattaacattattaactattagaagaaaatggatacttcgtatttaactatttttctatgttttttaaaataaaaataaagataataaaaattaatggatgatgtgtgaaaatagttataggaataaaataataatttatgaatgttagtgataaagatataatacaattatatagattaacgaaagatttgtgtagaaaaaaagttgttattaatttgttggctcaactgctcaagagctagttttgggtcaaaattgcttccagtgccgctgtcaccgtaactcttcttttaggataaaaaaaaaaaattattgagttatgaatattatgttattttttaatattacttaatatattatattaaaaataaaaatataatattttacatttttatgagcattaaaatcaacttttttaatttttatgaggacctaaaattaagcttttgaattttatgaagaccaaaattaaacgttatattttgtagaaactaaaatcaatttttaaatttaggctaaatatgattttttttctcataaaattaaaaaatattcgaatgtcgttcctctaaaatttatagtaagttttttttttctttacaaaattaaaatatgttaaatttggactagagctaggttgagatatattcaattaaaatattaaataaaaaatcaacagcatacgtctttatgtatttagccataaggataacaaagatacgtgaatcatgaatagatgcaaacctatgtagtgcgtttaacacttccaaattaaattaacagatccaattattctaatgttgaattctgatggtcaattctacatagatcaaataccgtgcttttctttcaattgaagataaacgttggatgcaatgcaatgcaatacgacgctcgagggagttgtgaaaattgaaaaaagaaaacaaaatgttatctagtctcatcatttcgagctatgttgctcatttcttaattattacacatttgaaaattacaaccaaaggagtctaattggttatacaaaatatatgaattgttataaattctcagtatctttgattcttatgaattttttttataatttttgtgaatgatttaccctgttttaattcttatccacacaaatgtaaatcacaaaaataaatttttagttacttttaaattgtaaaaaagtagaagttatactactataacaggagacttgatttaattttaaatattctcaatctaaatttttggagtttttctttcttcttttttaaccctgggaaggcaagcgatatcaagatatggccacaacgcaaccaatccgaattctataattaatgtttgaatacacatttcccacatccaactttgagctttttccttagcgtctcaaacgcacgtttcccacgcgataggattgcaaaccccgttcttccttgtaactttttttggtttatgcttaaagtaataaaattgggtaagatggtttgtgcttaaagctagtaataaaattgatttgggtggtctacccttaaagtaataaaattggttggggggtaaattacattttaaaactattagcagaaactcaccagaaaattattactatataagtctaaaccacaaacaatttaattgattcattcaagactattcaactacttctacattaagagatctgttttaggaaggttgttaatcaagatataagaggcattaacccctcatcagaaggatcagaattaactctggatcctttaccaagttgtcttccatcaagttgcaactgagcattttacagatattttcacaacaacaaaaaaaaataatgcaatgcacaatataaatactcatattgggtttggcatagttttttgttttttttgtcacatgctcccaaccagagtacaaaagctactaacatcaccacttatgcaacccagtgtctatcctcatctgatagcatataatagtctctgactcactccctatcattttcttccagcttgaacaaccaaagagtgaaaacactttcatggagaccaacttagattattccaagatgctctttttactcctccttggttccacttcattgattttcctctcacacttggcttctgcagccactcccaagctcaacactcaagagtgtaaaactcattccttcactcattgctgttcacacactttttatacttgtatcaaatcagttcatacttcataacattagtttataatcctttctgctttcccatgttttggatcggaacatagagttgcaaaagtgaggcagagtcaaaagtggttttgtctctctcatttcttttgtttggatctatggacagcaaaagaaaatcatggattggttgtttcatttcatcatagcttctaattctataattctatgcatatgcatctgtggtaccttaagactcatttgaatgttgtttgctttttctctgatcgatgaagttgatttggttgaattgtgtgcagtgaaggcattgaaggaaataggaagcaagattgggaagaaagactgggactttggggtggatccttgcagtggaaaagggaattggaatgtgtctaatgctaggaaaggctttgagagttctgtgatatgtgattgttccttcaatcacaattcttcttgccatgttgtaagcatgtaatgctctttctctctctctcttttaatttgtttcaatcaagtttttggtattctttgtgttttcgagaactcagattatggacgataatcacatggaatcacatgtgcacttaggaaaatgaagatgattttcttcaagttttgattaattaattaatcttcacggccatattgcttcaactatttttaatttattactacagacagcacctaaagttaccatcaaaccttcacgtgcaattacatatttttttaagataaaaaaattgttcagttataaattcatgttttcatagctggattccaagaacctttttaattgaagcaaaaaggaagaaaagggtaatgggtgtttttctactaattttctttttacctagaatatttccaaagatttatgcatatcctgcattcttcaaaaaattgaccatcgcgaatcttaatcatgcacatttgtggttgtgactcgtcaaagtaacgcgtagcactaaatgagaagaggaaaatgtttcttttttttttttttggtgaagagaggaaaatgtttcttggactatatttttaaaataaatgtataccagaaaaataaaaaataaaaataagtgacaattttttttttttttgagagagacaaaattaattatatacttatcatgtataatgttgatttcattatgtttaagtaccagaactcattaacatacaaaaaatttaagtttgaaatgtcggacacgggtctcaatcgacaactcaaccgacctgatgcaagttgcaaatctttgactttgaaaaggatgtgctgtctttatctttttttctcgtcaaaattttcttaaattttttaattttcatctgttgggctatacgttcatgtttttgcttcaaactatttttttttttttttgttacgtcgaactttgtctagtaaaaagtaatttgttgatttttttaaataggaaatgttgattaatttatgttcaaagaatgggaaagggtttactgaacactagatcaactgttgagtgttgatggttaccacagaaggggtactaatcactagtctcagagacaggtcaatgaccaaaaatatgtagtattatttttcatagataacacaattagtttttagataattattacgaaagtcagcaattttgacattcataacaattcatgattgtttgatactgtaagatactttaatattgtcaatcaaggtcgaagatcgtggatagtacaaggaaattaaaatattaccttaggtcttttaattttattttacttattattatgtaagtttttatataaatctgtttttattgttcaaattacaatgaacaatgatgttttataaaaagttagttagctacttgtcttaagtaacaattagaggtgaaaaaactaaaaatcaaaattatatatataattaaaaattgaatttgtagtttattataagcaattataccattaattaggaacatggttattaatgttagagatagaaaaatttaatagcattaagggctaaagatattaatgcatgatttatcaatttctttaattaaaaataacatttattcaacattctcattgtttctttatctctttttcatattttttaataccttaattgatatcagattttttttttataaaaaaattgtttatattatttagtactttttattcttatattttgtagtaatagaaaaaaatcaaatagaaagtaggaacttggttttcaaaagttaaaataaaaataagttaaaaaaaatctcaatatataatactcttataaatgtcttactattcataaaaagaatatataaatatgagtttaattggtaaaaaaaagtcacaaaaaactaaaaaaattattttaagaaataatttatataatattaagtttctttaaaaatttgactaatgccctaaaactcctaaacacggtcctgctgtcaatacattctaattaaattcttgaattaattctaaattctactttggttaattttttagatttaatctttttgtgaggacttcctaacttttgtacacaagggactcacaagattgtttcttttctcatttcatgtactgtatttgtttattgattggatatcttggaataatcatgttaaccaccatataattataaattctgaatttctgctttttatttcatattctaaatgaacagattcttgaaggctcagaatctgtctggtattctctcaccagagttttccaagcttcatcatctccaagaattgtaagatatcaaatctcagttttgaaaccatgacttttttttgctctgcatgatgttccctatggaatggtgaagtccactaactttgtcttgcactttcaaacagagaccttagtcgtaacatcatcactggttctatacctccacaatggggtaccatgcgcttggttgatctgtaagaactttctgctttgcaccctttggtttctctgcattgtctcttcaatttcttctgtatacagtaaacaacttgagagtgacactaaagattcttgtgaattgaatgtgcagctcttttatgggaaacaaattgtcagggccattccccaaagttctcaccaatatcacaaccctcagaaacttgtatgttgaaatcatttctttattttcaaatgaattgtatgtttactccatcacttagcttagtgataaattggatgtatttttaaagaaaaatagaaagtaaaaaaaagaagtgaaagatatatttggaatatctaaaggtagcttttaccttttgccaatatatttgcttttacctaaaggaagcttggcataggtgatccaggattgttggtttagtataatttccaatttatttctgcagctttgtttaaattaaatatttgtatgaatgttacaggagtattgaaggaaatcaattttcagggcacattccaacagagattgggaagttgaccaatttagaaaaactgtaattcttttgatcttctttgtgtgcttattggaaatttggaatctcaatatctgcttctattttccccctcacatattattctgtagtgttttaacatgagtaaatcatgtttgtttagcattctgtcatccaatggattcacaggagcattgccacccgtgctttccaagttaaccaagttgattgatttgtaagttcttatcaatttaacatattctagcacatggttacaatctgacagttaaagatacacaaagatgagccactttgattctatttaatattaggtagtgaggtgttaatgcaagtcactgcaggtttcttaatcaattcatataaggagctacaaaattaaagaatctgtagctttgtttatcacttttgttcttttattgttgttacatttaaattttgacatttccttgcatactgattaacctttgggaaacacattttaggaggataagtgacaataatttccttgggaagattcctgatttcattagtaactggacattgattgaaaagctgtaagtttcctacctcgttcattcttgttgtatttgttgtatagactactttatcatgttaacttttttcttttggggttacaggcatatgcacggttgctctcttgaaggtcccataccttctagcatttctgccttgacaagattaagtgatttgtatgtttgtaattctttattttatttatgttttggtcatagaagatgaatatgttaagtgattgttttatttattctttgatacttaggaggataactgacctaaaagctagtaaaagctcagctttcccaccactaaataacttgaaatccatgaagacactgtaagttcaatgacttaaatgcttctttctcttgaagtctttataaaattgacctatattttatttggacatcataatgcagggtattgagaaaatgcatgattaaaggagaaatcccagaatatattgggagaatggaaaaactgaaaattttgtaagttgttcaacaagtaacttacaacagttttgacaacatgatatattactttgaggatcattttccacttgagaagatctcatagaatcaattcaaagttggctaagccttcttttcatataaattataatattgacactacgctcataataatgttctataattttatctagatctgaaatataatttttttccaggtacaaggttttgtaggtcagttatggtattattttgtttatagccgtgaaacatgggtaattactaactagcactaaacttcattaagagagaagcaaaaatgaaacagatatgtctatagtctttccggtgtagattgatttttcaaagttgaatggttgttgctctgatgattcatgtgtcccttatgaacttctatcatagaccttgctttacatgaacaccatatcactttgtttgaataatactgaaggaagattataaagacagctataaaatgtagaacatgctcatcttaaagttgaagataaaatacattttttataatataaaattattaaccctttcgttacataaaacaagttcatttatttatcttcgttgctgtagagatttgagttacaatggcttgagtggagagatacctgaatcttttgcccaacttgacaaagtagacttcatgtaagtggatgcgttgaataaaatatgttattgatacatttcatttttaattttgacgaaacaaaatgtattaaataatgcaggtatcttaccgggaacaaattatcagggaaaatacctcgatgggtcctcgcaaataacaaaaatatgtacgttaaatacttgaattgttatgtttcaattttcagtcttcatcttaatatttgcttcagtggctacagcgaataaggcagtgaaatatatgacaaaaaatataatataatataataacaatagagtttaaaaaataattttcaataatattaaattttacaattttaaaagttgtatataatgaatatttaaaaaaaaaaaaaaaaaaaagaccgggtcatgtgagttaattcatgactcacttatttaatcattgatccaatatcttgactggatcgatcaccggtttggtctttaaaattatgctctctgggatcttcaagccgttgatgtctgcatctgaaattaaataagcactcctttagcaacatgagattaacatcttttattatatattttggtgcacagtgatatctctgacaataaattctcctgggacagctcaagtccaactgaatgtcaacgcgggagcatgtaaagttttagtttatttaagctttgagtaaaagttgtcttcaattagttatcagttatcactgcaacattttttttttttttttccagaaaccttgttgagagctactcttcatctgtaaatacacagtaagctgttgtctttggaatattttctgtaaaatttggttattggtagtagccctagaatataaccttaaatttctctcttggttgcagaaataagattcattcatgcttaaaaaggaactttccatgccctgcttcagttagccaatgtaagtatgtgaccatactacaacttttaaattacttttatgatctgatgggctggtttaaatattgactcaaattctgtgacctgaaattgagtgaaataagttgatgagaaactttcaactcaacatgatttcataccaaaagaaaaatttaagatagtcatataacatgattttgcttatgattctatttacgcaaaagttcactgcctacttctttgctaacaatcttaagcccagagttgtacagaaattcaaataaaacaaaataatgtaagaaggaataaatgtccattaggagagaaacaagaatataactgtttttcttaaggggttaagactaatttcctccttttctaattatttgaaataaataggttgactaattctaagaaacttaaactggaagataatttgatatccttttttattaccaccattgaatgattgtaatgacattttattcttttttattacaaccattgaatatgttacattctttgcgaattttacctttctatgcagttgtctatttttaccattagaccattacaatttgaaagattttacactgagtattctttcttttcaaccctgtttgtcattgttttttcaatagatcagtactccctgaacattaattgtggtggaaacgaagcaaatattagtggtaatatttatgaagctgacagagaacaaaagggtgctgcaatgttatattacactagccaggattgggctcttagtagcactggaaacttcatggacaatgatattgactctgatccatatattgtggccaatacttctagacttaatgtctctgcactcaattcacaactatacacaacagcacgtgtttctccccttgctctcacatactatggcctctgcctaataaatggaaattacacagttaagcttcactttgcagagattattttcatcaatgataggtcccttaacagtcttggaaggcgagtatttgatgtctatatccaggtaacaattacttgcttgatttgcaaatgatgctaaataattgatttgcaaatgatgctaaataattgatttggactgagttgtgcattgatgtatatggaatatattattatgtcctaaaattaaggggaatttagtgctgaaagactttgatatccgaagagaagctggtggtactggcaagtcaattgagaagacatttaatgcttctgtcacccaacatactttgaagattcacttctactgggctggaaaaggaaccactggcatacccacaagaggagtttatggacctctagtatctgctatttcagtaaaccctagtaagtcacatatcatgcatcttagagttagtgctttatatgacttgataagactgcagttgaaaccataatccattatgaatttaaaaattgtaggaaaagggaaagattaccactaatgtctacctctacaagacctccactagagttctgttatcaataaaattcatcattctttccttttatctgatccagttctatcagttttgttcttcatttatgcaaaagctaaaagtaaatatttttcccttgcacagattttaaacctccatcaggggatggcaaaagaacttatgtcatactggccattggcatagtagctggtgttttagtggttgttcttctggtgctggttctcatgaggaggatgggatggttaggaggcaaagatccagtgtataaaggtatggaatatgccaccaagttcttccaattcttttagttagaacaaatatttccatttgtttccaacacaacatcttttctgtatccagcagtatttgcctgagcttattccagaatttgtttaaataaatatttctacaaactttattcaaatgtcataaaactgaagtgcaacaatttacttctatataagatttgtaattgatgatatttctccatttcaccaaagtcaaggctttaagagaacatacgagagtatacttgcctgccctatgtattaatatgctagatagaaatgaaatgaactatgtgacagatattgtagagaaagttataaactttcttgttgaatccaaattaccaatattttgttttttattttcagagctcaggggcatagatctgcagacgggattatttacactaagacaaatcaaagcagcaaccaaaaactttgatgcagtgaataaaattggcgaaggtggctttggttgtgtatacaaggtacttttatcttccattcttggttacctattccatcttatggttaatttatttgttacttgatttgaaatagaagacacacttcatggtctctatatctccattcaattctaatttaacgcttacaatttaatcataatttctgtaatgtattttgtactcattagcaagcatgtataaccttcgtgggttaatgaaagagaaaaattatccacgtacatgatggttaaagtgtaatggagatttgttagatcaatcagcacttcagtagtttgaatatgtgtacctgtgtaatgctaatgcaagaaaaaaaatacaccttgttcatgatgcagggcctactatcagatggtacaataatagcagtaaagcagctttcttcaaaatctaaacaaggaaatcgtgagtttgtgaatgagatgggactgatatctggacttcagcatcccaatcttgttaagctttatggatgttgtgtggagggcaaccagctaatactgatatatgagtacatggaaaacaattgtctatctcgcattctttttggtaagcttcttgatgaataaactttagccatacttgccatttgaatcaaacatttgatataactaactaactgattgtccttctcccaatcacatacagggagggatccaaacaaaacaaaactagattggccaacaaggaagaaaatttgtcttggtatagctaaagctttggcttatcttcatgaagagtccagaataaaaatcatacatagggatattaaggcaagtaatgtattgctcgacaaggattttaatgctaaagtctcagattttggtttggcaaaacttattgaagatgacaaaacccacattagcactcgagttgcaggaacaatgtaagttcatattttgctactatttctcttgttttcatatcaaaccatggtaaaaatacccatttttaatcaatagtggagattctggtaaaaatcaaatgcatgtgtatcatactatgaagttagttataatttcaagcattaaatatttaacccatggttattgatgtactttattctgtaaagtatactcttagtcaaatccattattttaacaatgctaaatgcttttttttttcattttgcagtggttacatggctcctgagtatgcaatgcgtggctatttaactgacaaagcagatatttatagctttggtgtggttgcactggaaactgtcagtggaaagagcaatacaaatttcaggccaaacgaggattttgtttatcttcttgattgggtaattagaatttatcttaatgcataatataacaggctcaaacaaacaatagatactaaattaccaagacctatggattattgattttactagttcgtacatacacacatgcatatacgggcatatcaagtgagagggattttttgaaaagattaaatcacaaagttgtcatttttcagtgatcatgtaatcattaaatcacttttttttaacatcaaatgctagtttttagttttttatcggcaaatgttaaatcacttttaatcttaacgtatagttatttgtctagaattgctcatatatatatatatatatatatatatattgtaattctttttttagagttttagtatcaatttggtctaaaatttggtctaaaatttgagtttcattaggcatatgttttgcaagagagagggagtcttctggagctgattgatccaaatttgggttcagaatattcaactgaggaggccatggtggtgctaaatgtggctctcttatgtactaatgcatctcctacacttagaccaacaatgtcccaagttgtgagcatgcttgaaggttggactgatattcaagatctactttcggatccgggatattcagctattagttcaagttccaaacataagagtataagaagtcacttctggcagaatccaagcggaacacagagcatatcaatacctagtatttatactgattcctctggctcacatgttgaaacagaaaagagctatcatcctgtaaccgttaattcagatggatcagacaactgaaattcgtttcttaatgccacatatttaatacaaaactcgtggtgtattcaatgcaagaaaagagaaaaacaaaattaaaattaataacaatgtaaagagttttatcttgtcgctagttcgcacaaaatttggggtgtcataattagggatgacaataggtaggtctaggtaaggtactatagtatatgtttctatacttgcatttaaaaataatacccgtacctggtcccataccctttcaggtaataattttaatcttattttcgtacacgtttgatacctatatgcccatacccgcacctgtgactcgcacattacttatgtataaggttaataataataaattgataaaaataatttaattaaaacaagcaaacataacattaattcgtccaaactcaagtcataaataaaaaaaataaaaaataacatacaacatagtgattgctaaagctaatattttaatcgctaaacaaaaactctaattaaaggtttagtatttttcactctctaacagtgatatggttagagattaaagacttagagttttatcataaaaatataattatttttcacaaaatattatatatatatatatatatatacaatatccgtgtaaatttgtgcatatacttgtccggtacttagtcctattattatgggtaattatttatcccgcttgcaaatatttttgcgatattcataaaacccatatatactttgtaattcctaatcatagtttggagctatggttatggaactattcccatcacaatggggtgccttaatttagggttattcagtaatcttatttttgccttaaaaaaaagattagttataatttacgttgacatgtgaggattgctaacaaagtctctattgcttaaatttatctaaagctgcaaaatcatgtgtaaaagtcattaaataaagtgagacgtacaaaattttatgattttaaataaatattaattaatgataaaaaaagtgttcaataaagtatgttaacgaatatattactaacatttcttttgatatattgttaaaatgtttttaataaaatatttaaaaaaaaatagattattagccgcgtagtccaaatgaaatattgagaggaaaaaaaaggctaattgaatttcagcatattttctttattagtgcacccaactataggggggagggggaagaaataatttgtactggtacacagaaaactctcttatttctttaacacaaacattttgctaatcaattgtacattttactgctcccatgagatatgtaaactatgcttatctatttattattcccttgtaacaattaacaaataatttgaaagtagaagtactgaaacgtgacttgcacataaaggcttaacaaatcacaccagcatcgttcttctggtaggtgatggatgtgacaccagtagcattatttatgccgacatgtcatcctgatcatagcaaagttaactttggattataaaaagccatcaacaaagaattatttacgttcgtgagaattatatatcaccttttggtcatcttcttcatataactaaattgagcctgtaagctataccccggatccggcaagccgccgctttgaggcatttgatatggccacctcaccaagcttgtcagcatcacttgatgtagtcctgacattgactggtgtataatgccgtaaccattccccaacgtaaacctgaagcataaaatagatatgatgaaactaggcaagagattgaaataagaaaggcgtcacatgttgttaggatccaattgcaaggtattgggtcttaagtcctacattggaaatatggggttctagttctagtgtaggatttataaggtcttttactctccaatttcaatgactaacttttgtggtgtgattctctcaaacttcttatcgattggtatcagagggtttcaccatgttctcaactgcaaacgagcactggagatcgtgatgccaacattgcagtgttcacctagaactaatcaaattatcaaagtgctgcaaagtgtgatgagatgtttggattcaattgcaagataagggacttgaatcccacattggaagtatgggattctggtatagttataaggccctgtctccaactacaactgctaatttttatcatgtggttctcccaagtttcttatcatgttgtatatctttaggtagaattgaagagtgtggtagttataggtggctctaaaagtttaccatacagttctaatgcattacgcaaatattgcctagtaccactgttaagaaatataatgcagccatgatacaacttgaaaaccattttccagtaaaacaagtgatacacaacaagtacagctacattagcacaatacagtaagcatgatatatttttaatatgcaagaaaatcataacaagaaaaatgatttaaagaaagaaattaacctgttgaggtctcaaaatctttgtatcaggatcatccaaggactctctccaatgagccaagtacccagccattcgagggatagcaaataaaacagtgaaatactcaggtggaaatcccatggccctgattgcataaaactattagttcaagccttgtatggtattcttttttttttgggggggggggggggggggggggggagagggggcatatttttatcctccaagttagaataactgggtgaaataatggattacctataaattaatccagagtagaagtcaacatttggatatagcttcctcttgatgaaatattcatcagatagtgcaaccttctccaaggcaactgccacctgaacgatcaaataattacatacagaagttagaacttttgaagtccatatactgaccaatctacataaattacataggtactttcctggtcagggaaaaatagtgccagaaaccctagtaatactttaaatttgaaaaatgaaaggtgttgctagagatttttaatgtcttaagatcttcatttgacttgatctgctattttttttccaaaccaaacaagacatctaatgattatgcatgtagacacaatggtgccaaacttgtatgcacaaacatatacaatatacacactaagcatactattctgtaatcaaaattaaaaatacaaaaatacatttaaataaaacaataggaaattttttaaatgtagtagtttttctctgtattcacagccctgatcataggcctcgtgaccagcataccaagatcaaggaatatataacagacaatagacacaggaaatacggaatggataaacacctcaataagaggatcccggcccacaatggaaaacacttcctctgccagttttcttaagacctttgccctgggatcatagtttttgtacactcgatgtccaaaaccagagagcttgcgtttcctggaggaaaaatgcaggacaaaaatatcaactaaaactatcattttctctgcttgctgaaaagagcaggtatcatgctatcctttcagggtataagcaatgctaacaactaaggaaagagtaaaaactagataacagaagaaagtaatactgtaatagccacctggctttgacaccttcaatgaactctggaatgttctgaacagttccaatttcactcagcattttgaggacagcctgcagaattgaaggtcacattaacatgttcccatattaaataacagtatagtgtttgtgtttattcactacgttccacctagcaatacataaaagatcatgactgcttcattaaccacttatagctacctcattagctccaccatgaagtggtccatatagagctccaacagccccggcaatagcagtgtatacatcaacgccactgaaataagaataagatatatagtttagcaatatgacggttttatatttgctttatattgcttaagtagtattgcagtaagatgtctaccttgatgcaaggtgtcggacagcagatgtagaacaattcatttcatgttctgcgtgcaggatgaagataatgtccagcgcacgagttagcctaggattgggtttatatgaccgattaccgctgaaagtatgcacagtggagattgtgttaatagttaaaactctaaaaaacagctagtatgtggctaccattctatcacttaagattgaattatacctctttttaaaaacaaaaatggatttgttatatatgagcaaaactcaaactaccattagtctataaagcaaagttaaatataaaaaagcaaggttgtcttaattcaaattaacgatcaagcacaaaaataccatacatacaaagaatctagcatgtataggaagttctctgtgtaagaaaggtggttggatggaagcacaggtggccttcctgccattctaagataaactgcagcagcaattgttgttatctgcagtaaataaaaaggggtgaaaatatgatatggcaataaagcagtaggacacataacaaataatcatagggttgcgaggatagtggacaaaatcccacaagatacaatcagtaaaaccagggctagaatcattcaaataactaaataatttgcatgttttcagagatagaacagtgaaaggagaagaaagaaccaaataagcacacctttccaataactcgtgttatctgtttgtctcttatttgctttgagtcataaatatcaagaccctgcattaattataaaaaaaaaaataatgaaaaaggatcaaatctggataaaggaatataacagagcaataacaataaacaatgttgaatcctaattagagaaagagtatcattcacaagtacattgtagtaacccacaggaaaaagtagcatccaaaaggaatcccaagattagttttattatatctcagtatctcaaatctctaatatgccccctcattcactccagagtcctttggactcgaagcatagacaatgtacaaatttgtattaaaattcaacttattaacaaaaaatgacttgacagcagtttttgttacttactctgagagcgggatttgcatcagggtgaaaaacagaaagagcactcatggcattaacaagcacacccatgggatgtgcatcatggggcatagattgtatgatatcctacaaaataaacgtaagatgataccactacttagttagattaataatcccaaactccattgaaagaaacaaacaacataatctttctattttattttatatgatcacttcaagagctactagatttctttaacaatataaaataccactggcatactaaatttcaagaagtaaaacaattagtggaagttgttcacattttacaaatctaaaagctgtcactgactgaaacaaaaaaagttatcatttagcggatgggatttggagaacataaaaacacaataagagttagtttagataaagcataaaatctcaccaaaactccttgtggaacagccgaatgctgagatatagcaaactcccattctgctaactgactttcagaaggcaaacttccatacacttgaaaacagaaaaaaagatgcacgttaataaatttcagaagaattcatgctacatacatatcgaagcacataattaacaagaagcagaactaagcccaaaattcaagtgtcttcaataacataaaatctgtttaagtgaatcctcagtcaaaatgttttatctactcatacacaagcgccacagaagcctcatacacacatttgcagtgaaacagaacactcacttatgagataggacacttccgtgaaagtgcttttctctgccaactcctcaatagggtagcctctatatctaagaatcccctcatcgccatcaatataactaattgatgatcgaacaggagccgtgttcaaatagccaggatcataaagcttgagtcccttgtcattcttcccagtcgatatctgcaaatccaaaaaaacccataacataacaataactaaactaataagagtaaatagtgtatatattactttcattcaatcacagactacttgtatgttaagtttgttgacttttatgctaagatggtttcttattggttggtagtgtaaatttacactgagcatgcataaaaactaaactcaatgttaagtaagcacaaacagtcatactataatcacaaaccatcccacctaagatttcaccatgcaactaggaataggaaaaaagcccactttgcaaacaattcaacaaagatgaaaggagcagaattggtggagacccagtttgcaatattggaaattccttggaaagcaaagatcgaaattgaaaatttcatggatgaggaggaaatttaccttcttgaggtcagaagctttgacagtgccttcattggagacctgaagctggtacttcttgccggttctgtcgtcgacgacggtcaaagttccgtggaggttcgtcggcggcaactgagtggagagagggagagggcggagggcgtcgtgatcagtgagttcagaggggaggaggtgagcagcgagcatggccaaacggccacgagcatgcagcgtcgctgctgctgcatctgaattgcttgacatgttctctcttcagaacacaacaactattggaattcagagagaaaaacggaggatttggagttggaggaattctgaagctaaaagagacgtatacgctcttaactaataataacggataatcttgtctacgagtttagacttccgagaaaaatattaaaaaatttaagaaacttgttattgcaattttttacagtatgtaacaagcgcggagtagttatcatttattaatcttcgtagaggacctaattaaccatgaactattaatggtatggtatatgctcaatttagtccctaaaatatatatttgttgacaattttacttttatattatgaaaatcatttatttagttcacaaatgtaaaatgttacaataatttggtctaatcgttaaaattatttcatattcattattggagatagtctacatgactcactcattcacataatgacttttcacattatttttgactaaattatcacatttttttttaaatattgatttttgaaacaaaagtaaaatttcattctaaaattttttcaccaaaacatatatacttactaacaacaaattaatccctaataaatattatgaactgataaactagtccgcaaaataagttataacatacacttagtaatataatcatccataaactaagataacatacacgtaatctacgaagctaaatcgagcatttatagaatataaaattattattcattaaacataaaatatcgaagttcccaagtagtagtaaaacttctaccaaagcatgccacaatgtcaatgtcataatagaaatttccaaaaatatatccaaaatacatctaaaacacgttaatgcctaacttttcaaaatatatccaaaatatgtttaaaacacgttgaatccttttgaagggagttgaggtagttagatatgtggtataggatgaagctcatcaagcttgattgtggcactcttggagatacttcaacttggaaatgaaactctaagcatatgagtatttgcagatcggataggaagtggtctaagtgcatgtgtaagtggtacaaatgttgtgacattaggagctgttggtggtgtaacttcaattgcaaattttgagaacaaaccatttcttcatgcattgaatgaatgaaattaaaataagttattatattgatgattgagagtaaatggtttctaaataaataaaaaaatagataacaaaaaatatgagtatactgttatttgagttgttccagcgtaataacagcaactacaagtaagtgtttccattttttaggttgcagcatctcatacaagtaagagtgggaaaattctttgtaattgacatgatatttaaaagttaatttacagtttatttaattaacttgtaacattgtttaacaagagtaaaagtataggataaactaaatttataaagaatagttagtcttatatttatttgttagcgttaaaattatgggttgaattgtcttagatctaatgatctgaaaaatatatgttcatcttaaaaaaatataaaacctcatttatcagtttttaattaagcttataaagtatgaatggcgcagctaggtaagttgcgcgtggcatgaattgaagagtgcgggaagagaaagtgaaaggaagatgagggtggcggaggaggagaaagcagtgttggagcaagtgttcgggtcgtcatcatcagaagaatctgattctgatggctacagcgagagcgagtgggaggccatcacagaagtgaatggcctatggctgtgccgtcacttcctctctccacgccgccagtctcacatactctcctccatccaagccgccaattggttcccctccccttccatcaaccaggccatgcgcttcggcctacaacacctcccttcttgggccacccctctggcccactccatacgccgctccgtccaagcccaagcccagtcccagtcccaggcccccttccccctccacctcctccacagagaacctctcttcgaccagatgatcgccaacgtctaccagcccggcgaaggaatctgcgcccacgtcgacctcctccgcttcgacgacggcatcgccatcctctctttagaatcttcctgcgtcatgcacttcactcccctctctggttccctttccgttcccgttttgctcccccctggttccttgattctcatgtccggagaagcacgctaccgttggaaacacgaaattaatcgcgcaccggtgtttcagatatggcacggtcaaccattgactcaatccaaacgcacctctatcaccctcaggaaactttgcccctcctctccctgattccacactcaaccctttctttctgttataataatttcaatgttctattagtcagcattcactaaacaaatttcattaataattgtagtaataacagtaacacgtatcttatctatctatctctgttattcggcgttgtttgatttggtaccgaacgcgatgaaattcagctgatatcgtctgataaaaccatcgtgttatgcataactcatattttatgggcgaatttgtgtgcaatgcaaccaaatgaaagtgtcatgtgaatgtgacgattaataccgagcaaatcaaattatttatgatttattacgtacattgatactggcgcgttgtaggatgaggacgagttcttctggagtgagaaaaccgaaccattgatgtgtgcctctcggaagctgccaagttcaaattatttatgtcatatatactggccatcggcatagtagctggtgttttagtggttgttcttctggtgatggttctcatgagcaggatgggatggttaggaggcaaagatccagtgtataatggtatggaatatgccaccaagttcttccaattcttttagttagaacaaatatttccatttgtttccaacacatcatcttttctgtatccagcagtatttgcctgagcttcttccacaatttgtttaaataaatatttctacaaactttgttcaaatgtcataaaactgaagtgcaacaagttacttctatataagatttgtaattgatgatatttctccatttcatcaaagtcaaggcttattaagagaacatacgagagtatacttgcctgccctatatatttatatgctagatagaaatgaaatgaaccatgtggcagatattgtagagaaagttattaactttcttgttgaatccaaatttccaatattttgtttttttattttcagagctcggcaaagatctgcagacggggttatttacactaagacaaatcaaagcagcaaccaaaaaatttgatgcagtgaataaagttggcgaaggtggctttggttgtgtatacaaggtattttgatcttccattcttggttacctattccatcttatggttaatttgtttgttactggatttgaaatagaagacacacttcatggtctctatatctccattcaattctaatttaacgcttacaatttaatcataatttctgtaatgtattttgtactcattagcaagcatatataaccttcgtgggttaatgaaagagaaaaattatccacgtacatgatggttaaagtgtaatggtggagatttgttagaccaatcagcacttcagtagtttgaatatgtgtaactgtgtaattctaatgcaagaaaaaaaaatacaccttgttcaagatgcagggcctactatcagatggtacaatgatagcagtaaagcagctttcttcaaaatctaaacaaggaaatcgtgagtttgtgaatgagatgggactgatatctggacttcaacatcccaatcttgttaagctttgtggatgttgtgtggagggaaaccagctaatactgatatagtgatatatgagtacatggaaaacaattgtctatctcgcattctttttggtaagcttcatgatgagtaaactttagccatacttgccatttgaattaaaaatttgatataaccaactaactgattgtccttctcccaatcaaatacagggaaggacccaaacacaacaaaactagtatggccaacaaggaagaaaatttgtcttggtatagctaaagctttggcttatcttcattaagagtccagaaaaaaaaaatcacacatagggatataaaggcaagtaatgtattcttggaccttcttatcttcattaagagtccagaataaaaaatcacacatagggatataaaggcaagtaatgtattcttggaccttctctgcttccacgacggcgtcaccatcctctcctttgaatctgactgcgtcatgcacttcactcccctctccatttccctgtccgttcccattttgctcacccctggttccttgattcttatgtccggtaccggagtttcagatatggcacggtcaaccattgactcaatcatcaccctcaggaaactttgccccctcctctccctgattccacacttaacctttatttctttctgttataactttaatgtttattattcagcattcaaaacaaatttcaatattcaatactaatgataattatagtaataacagtaacatggatcttatttatttatctatctatgctattcggtgttgttttatttggtaccgaacacaatgaaatttacgttgatatcatctgataaagaccaccgtcctgtcaccgggttatagacgaatccggccatctcctccacctgtgtgtgcaatgcaaccagaataaagtgtcacgtgaatgcgatgattaatccctaacaattgaaattatgaatgcgttttgcgtatgtacattgataccggcacgttggaggatgaggacaagttcctctggagtgagaaaactggaccattgatgtgtgcctctcggaagctgtggagttcaatatatatataatgtgtcgattgaatgtaggatggaaaaaataagtgttgaatggagttgagttgagaagaatgaatacccagtggagaatgtattctgcagcaacaatggcagttgcgtaggctctcatggatcgattgattgtggatatcacagtggctccatctggaactgttagtgctgacagagatttgcagaactctgcaggatctgccacgtgctcaatcacctgcaaaaaaattcaaagcaaatgaaccaatgcaaggcaaaatgtgtccttcaactccactgagtactgtactactatcaaagattttacgctacaagttatgtcatatttttttttttttttttttgtatcccaacacccatttatgcactccaatctgcaagcacacaaccagaaagaggtaaggggcacgaaagagaaagtacctccaaggccataactgcgtcaaacgttcttccttcttcaactagcttctctgatcagtcaaaattgttggtgagttgtaaaatgcagtgcataatacccaaaaacataaggacaattcgaaacgaactagatgaatgcaagcaactttgacttttacaatgattattgaagccatcatgcatgtactgatgtaccaagagcgttcaattttttaagtatatgtaatgtaacaactcttttagcttaaaacttattcacccacttgagcgatttagcatgtccaagtatgataccttgtataatgagaaacattaagggatagagtaaaaactttcttcaatgtaagaccctagtgggaagacataagatcatagcaaaaaaaattgacttttctacagccaaagatacattctaagactctaagttaagataaataacataaaatggttattaactacaagctgtaagaaaaacaagaaatcacaagccaacaggaagtgaaaatatttaagttttttatgccaatgcatcataatctcgtaacttttgaaactctaaactatccagcaaaggtctgaatccatggaaaaaccactcagaaaattagataaaaggaaattatgccagtcagacttgtgcttcttatcaagattgtgaactaaactgtattagcattcatttggataagtagggcatttcagcagtagtgtccaaatgttaacagacttaaagcatgcacgtcaaaaatggatgtaaaacaaaagtgtaaaagaatgcttcaagatttgtaaatgtaccagctgtcgtgcaacagaactcaatagatgaagttgctggatccaaaccctgttgacaggagataataagttgtccggcaaatagtgaagatttaatttactaatgttggcaactgcttcctccaatatacagaatacagcaatctaatcaatttgtaggacaagactgacaaatttcaaatattcaaatataataagcatacagcatgaagttgagcaatcttgatattcttctctacagcatcaacacccatcacagtagctcccaatcgagctagtggctgaagaacaaaaagagaagcatggctataaattataaaataacaacaaaaaagagcacaaatttacaataaaaaaacaataacaaacttaatactctataagtgagagggaggccaatatgcaccaaagaaataattcagatttccacaattcaagtattcaacctaacaaatatagtcacctctgaatccatcataatgctacagattcgcatgaggattatgataacaagtaatatagtcaacaaatatagtcatctctgaacttattataccaaactataggtttatcataggccagattgccagaagataaaaaggaaaaggtcttttccaaaaatcacaggaaaaaagaagaaaagatatacctcagaaagaattccacctccacaacctacatcaacaattttaattccttcaaggggtttggcactataagggtccttcctgagacaagggtgaaatctaattattatttgaatagaaccccgttagagacaaaataaaaatataaacccattgtcaaccgtaataccgtttttcctattgtttttcttcttgtttcttcatttggtttgtgtcaaaaaataattcagttaacactttttattaacagatacttcattagaatcatcttcttacacatccttatacgattatatttaattcaaggggtattaaaccaaattcctaccatgtatgtgtagcaaacactaagtgctattggtttaataagactgcataaataacagtggcttggaatctgacacagtacaaccagattatattttaaacccactaattccatgcaaaaaaagaaaaaggaatcaaattataacatagcacaaagcattgcacattctaccaaagtagtttcaagaataaacaccccagactcaagaatggaggtacaaggactaaatgaaagagcaggcttacttgaaatgtcgacaaagtgcagaacggatgaaagcaagtcttgttggattcatcacatgcaatggcttaaaggggccttcagaatcccacctattcacatcaaggaaagggcaaatacatgtcatccatattctcaaactaacacacacacacacacacacacacacacacacacacagtagcaacaacttcaacaaattcaccccatgaaaaaaaatgtgcaatttaattttaattgtggtgtttataacaataaattcattgaacagattctctctttcgtttcgaaagctgaccaggtatcggcgatggcggcgaacttggcgagctcattgtgcttcaaggatgatgatggaggcgaaggttgttgtttgggctgcggttgaggcattgaagaagcagcatcggcgaagaacctagtagtagcgttaaggagaggctgaaaacgatggtggagaatgcggtggatggagatgcgattgaggtttcgaagatggttgaaagccatggccacggcaatggcaatggttccgcgctcaaaatcttcgtctcttttcctgaactgaacctgaacctgaacccttcagctaggtagatccatggctgcaaacctgtcggagctcctgttttgacccgattgtagaaaacgggttcatgtttttaaatatttagaattttaaaatttggttaaatagtgtattttatgtcccatttttttatatacatctctccatttaaaaattcataaatctagcgatgttaaaaaaaatctaaatataaaacacttctttaactcttccacccaaattatactaaagaaagtcataaaaggtataaaaaaatatgtctattcacatcaccctaaaaaataagattaaagagatgaaaaattgataatttatatagagttattaaatggatccaaccaataactaaagcgcaatatatgaaaagaaagcaaaatacaacactatgaaaaattcaataatttataagaataattcaataattttttaaataaccattttcaattcaattgataaatttagaaaaatatttagtgaaaaaaaaaataaagaatgagtttgattgtgaaaaaattggtgagaagtgaaaaaaaaaaattcaaaaatataaaaaagtatgataccttcattacattattttaatttaaatatttattttcaaattatcttttattttattctctttcatcttaccaaaccaatccttaaattttattatcatataactgtaatattatattcttataaaaggatgtagagcttttaagtgtcactggccatttatgagtagttagtaagatcatttagtagtttataagttattttgactagtttataagatagtataattaaaaaaaaaaatattttatataataaattatgatttaatgattgtataaaatattttataatatgtataattattttctcattttttattatatatccaccgtgttctacggtgaaggttcagttttaacaacgttcatcttaaaaaaaagtcattaacgttgcaattaatttaattagaatctcctaaaaaaattaattagaaagtcaacattggaaaaatatcagaaaaaaaatctgtaagaaagtcaacttaaccatctaagcttttatcttaaattatactattagaaaatatagttgtccaaaaaagaaaaacttagttaggttagctagagaggcattaccgaaaaccgacgttgttccttcctcgatggagtgtgtagtaagaaaggcggtgacgtcaaagatttgaactagtcactctctgacacaacacagaacccgatcccatcctttatcaattgaaccaaaaaatcattacatacacattaatgttcattcacacactctcttattctcatcccttcttcaatccaatccaattcaattcaatccacattctctctcgcaccgaaaaccctcgccgccgcaatggaaaccaagaagctccaccctcgcttctcgctcggccgccaatcctccctcgcgccggagcgcgccggtgacggcgactcgtcggagtcgctggacccggcggtccgtttgatgtatcttgtcaacgaaggtgactcggacgggattaaggagctcttggacgccgggagtgacgtcaatttcaccgacattgacggccgcaccgcgctccacgtcgccgcctgccagggccgcaccgacgtcgtcgacttgctgctccgacgaggcgcccacgtcgatccacaagaccgctggggcagcaccgtaatttcactctctttcgctcttctcgctgtctcttattctacactcgctgaccctaatttctggattggattgtttaacagcctctagttgatgccatgtactacaagaaccaccaagttgtcaagcttttggagaaacacggtgcaagacccccggtatgtctcttcttcttagatcttattcatttcctctaaaaataaagatgttattcatttcgagagattaatagatagatgtgcacttttggtgtggaattttttacgttgtctattaatcagatattactttttgtatgacttttttaagtagttattataaaaagtcaaacatatttatcatgaatggaaatataattttttttacgctgtctgagcatacatataattccagttcgccttatagttcaagcttttagaagagaaagtagtatataaactgacactgtacaaattttttatatttcattcaatcacaattcgtaataccatattgttgtgtatggtaggttgtttgatttacaataaatacgttatttaaagagaaaacacttttttgaataaaataaatagttttctgctcttttgatgtgtttgtctaactgtttttttcccttaaaaaagtagtactagttttctgttttttgtttaaaaaagtattttttacaaatcctatttgcttcttaaaaaagtattttttacaaatcatatttgtttcttaaaaaagtattttttttttaaattgcttttacactgcagtgtatttttttacactgacagtgcatagatattaaactccttttagtataggttgtttatgacatcaagttgcaactgaggactttttattgtagatggctcccatgcatgtgcagaatgctcgtgaagtacctgagtatgagattgatccttctgaacttgattttactaatagtgtttgcataacaaaggtaagctttcaagtttcctttctctgtatggtcaattgttttgtaacttgatttctccttttaccttgttttgacatattctctcaagtcaatttaccctgatttattttttgtttcatattttatattgaatattagggaactttcaggattgcattatggcgtggaatccaggttgctgtcaagacacttggggaggaattgttcactgatgatgataaagtgtgggttggtctacctatgcaatctgttgtttcattcatgtcaattactcaattggatattcagttctcaatttttgttctcatagtggattttgtttgttggtgtctgtttatcagaaaggcatttcatgatgagcttacattacttgagaaaataaggcatccaaatgtagtccagtttttgggtgctgtaacacaaagcacaccaatgatgattgtcacagaatatctaccccaggttagtcttggtcctacactggttatatggaagattttttatgataagttattttgcccgtggtgtttatgaacaaatcatattggttagttggctaatggctatcatagataatagtgagctgaataaaatatgtggtcagaaatttatcattttggatatagtctttggaaagaaagtgactagcgtaggttcaataggactacttgaaatctagcattatgttggaggcacaaaaaattaatacttaagaacttaatatgataaaagttatactgggactgatactaattgttgaagtgtcaggagttatttgcaattctgaataggccagacaggatttggccctctaagtgaaaaagtgagggattatctacaattgatataaagtcggttatgtatacaaaatgctttaattcaaattgatgattggtagattcttactttctcactttctcactttagaggaactgaatccggtcagacaattatgttcctgttctgtctagaagttataaatatctaaattgaaggattttaagtaatgataagagataaccattttagtctagtattgataagtgctgaattagaacttccatttatctttattgggatttcactttatgttagtgaaatggtgaaaaaaataagtgcatataattaggaagatatctcctctatttgtgtgtataacgtggttaactataccttgtatttttcactattgtaatgtctgacaatttggaatggattatcatctctttagggggatctccgtgcctacttgaagcagaaaggtgcattaaaaccagtaacagctgtaaagtttgcacttgatattgctaggtcagtcaagagctttcatattatggatgcatcactagctttcagttggtttgcaaggaagcaagctctcctgattatttcatttgttgaaaagttgaataattaatgaagattttctcctatattaaaaattttcatttggatatttgtaataattccaaaatatgtatattttgcaggggtatgaactatttgcatgaacataaacccgaagccattatacacagagatcttgagccttcgtatgttttatgttctcctgtcctgtcttgttgattttattattcttccagcatgtgtatgaagtatcgtggacttttcagtagaagcatgcatttttaattcattattgaatggttagaactgtttaaagtttcttcattgtacatgagtaagacaacagaaatatactgcgggatgattctgggcatctgaaagttgcagactttggagttagcaagttgcttaaagttgctaaaacggtcaaagaagacaaacccgtggcaagcctggatacatcatgtaagttttcttctttagtggagccctggatagataatgcaagttttcatctttactggaaccttgtaatattcgtggtcaatcatgtcggtctgcataaaagcaatattgtgaactcttatttcatgagggccgtaatgtgcacagtgttgcatattctgcaaggaaaaaagaaatgctgtctactcagtgactaccatagacagttgtcagctggtgctcaattttactaatttgaatttatcaattgatttataaatatggccatctcttatatgtataactggttttattttaatcctattgtaattggttctgatttcaaagtttgtattgatgaatttattcaaatctgtaacagggcgttatgttgctccagaggtatatagaaatgaggaatacgacacaaaagtggatgtattttcatttgctctgatattacaggaggtaaatcattattgctcatctttggatgcatgctgattttccttattttagagcttttaaatgacttccaagttaattatttacccttattatgtgaatggttgtatcttctctggtcttgaaacaagacttttaaaccctaaactggcaaattaattaataaatataaaatctgtttgatgaattgatgcttgtggaatattatagtggtattgagcaattaatacatgctaattcaatactctccgtcccttgtaatttctgtttatctcatcacataaaacttttaaaaggctgttaattgcatttgctttcttaaaaaagaagggaatttactttatgttgtctgtgctttttcagttatattttgagcaattaaaagcatttacataatcctgaacataaagtcatatcccctacatacatacatctgtgttgttcatgttagttaaaaaattggaagttcaggaaaaggaatgcattgagaggtgtatcatctgttgctgtgtatcctatgttgcttttggcattcaaattccttcagcattgttacgtcatattgaattttagatgtttgatggtgtcttttacgcataggacctctttcacttgtcaagtaaatacgtataggagtctatggacagctcaagcattcgtgacttgtgagctctgcctgctttgtccatcagataatcctaaagatatgtatattatatataattgtgatatacaatgctttattgcatattttaaggttgatctaatggacaggtagagttctagagattttgagttctccacatattgacccaaaaaatataaatgtttgtatatatgtgtatattcatggtcatttaagtaagatgccatgcccaacagtttgttgtggtaccaatatgttctcgtacttttttttttatgtgaagacaaaatgttcattttctgaaagttcaaaatatgattattttatttgtggatgatgggcaattttgtatatagaatatacagattgacaaccaactgtaggttgttatttgtagagatgcccagcaaaatattgacaggaacttgcatgattttctgttcctctagatgattgaaggttgtccaccgttttatgcaaagccagaaaatgaagttcctaaagcatatgttgaaaatgagcgtccaccatttagagcttcaccaaagctttatgcttatgggctaaaacagtgagggttttaaatacatttaattggcagcagatttgaatgtttagtttcaaaacctaccacaagtaggaaattaaattaataagtttttcacattcaggaaatttgatttgtccataggttaattgaggaatgctgggatgaaaaaccgtacagaaggccaacatttaggcaaataattgggagattggaagacatatactaccatcttgctcaaaagaggggctggaaggtatccctttttcatgtgaatatttctttcatcaatttttagacctagttatggtagtatataacttcgcagtaatttttaatactaaaacttaacagaatgtgaggaatttcagattcaaagactttttctgtatcattggatggatattaataatttttataccaacgtaattttactagattgactgtttttaatccatctcaccagtagaatgccctcaaaggtgtggatattgtgcgatatagttattttacaacgagactgtgtgattctttgtttcctaaggtgtaatattttcttgttatgatacacaggttaggactcctggatgcttccagaatctggaagccatatttaggggtaatcgcacaaatccaagtagccgatcatctcgctttacggccagataaatatttgccttgccatcaagaaccaataaattttttgatcatgcagtatcatatacttgcacgtcatatatatagttttttgtaaataactttcgctcgacgtgcggttgaataaattctgaaaagaatgtgacatatcattgtgtaattttgtccaaagacattctttctagttcttgcttataaaaaaagttagttcttttctaaactttatctttttaaaatattattttaaccttaggcatattttgttaagacgctgttctttttcaataaagaaggtaccatgtcgttgctcctattctcatgtgtgggcctcaagagaattgagtacctacctgtttggaccggtgaacagttttactttttaacactgatccttatgttatcttgtttgctttcatccatctatttaaatataattgtaaatacgaagatttttgctgcaaaattaaaacaacgaaaattttctttgcaatatagctaagtggcaatgttttgcttcctagtttcttcctcagtaatgatgctgctgcctatgattctgataacagacaaccttacgaatcagaatgcaggacgatgttgatggatagaagctgccaatgtcttttcatttgtcttttttaggaaaaactcaaacattttttttatccatttgaatcaaagaatttataataactgtttaatcaattaaattaaatccttttactgtttacacttaaaagatgaaagaatttttaaggaataacaaacaaagggtcattttgttacatgcaatcaaattttgttgtcttcttttttaggcattaattttttttttgtagtttctaacacactgatttttctctgtgcccgtttcgcatgcgcttcgcgcaccattggcgctttgctctcctcttattcttcattggaggttcggatggacttcgccgttctttcccaactaaaatagaaaaggcttcagaagcttggctagttctccttactcggacattctgttcatccgatcactgtccatgcttccaatttcgttgtaacgagatctagttctggagttagagttaacatcgattgttaaactccttttcggagagctcagaaaatgcagactcaaagtgaaactgtgttatttccactataatttttagtagtctgggaacacctttaagccgggatctgcttttgcaatgttttgtgcatgttcgcatactttgacctatctaatgtctaggttggttcagtgccattctgagggtttgtaacaaatgtgtccagatgctgctgcaactgcaatactgcaaacaagtctacgacaatggacagtggacatattaagagcattttgaccgttggcgttacctatttttatatttcttttttcataattcaaccttttatttaaaaaagaaattattagttaatgggtttgatttttttatacattgttaatgtaaatatttttataatgtcacgtggaaactaattaaaattaccttaatatcactttaaaaataatcttataaaaattaacaattttattatatatgttagtttatgattaataataatgtaattttttatgttatcattaattcaaaaattgataacgttgttaacttatttcatcaaaaatttagaagaaaaggatattcataaattgaagtctaactagacccttaaaaactttccacttgtaaactttgaaaaagaaaaatcattttagatatttgcattccatgagcctagtacattttacaacttaggttgggttgcaaataggactaatggatttcgttatgagtataaggcataagtatttattggtttttggtttgagtgacagataacttgatccccctcaaataaatttatgagttgtatatataaaacttaattagtctcttaactgtacaaagttctaaatttaaaattagcatttgaatgctaaaaatttaacaaaaacatgatccactgtaagttatccccccacagaagcatagcacaactttgactaccagaataccaggatgggattacctttctctataatttgtacccaaacagtatttttgcttacctgctagtaattaatttttaacaagacgatctgaaatctgaaaatatataaattcaaaatttaagaagaatcaatataatgtttgctttactgctcgcatttaggcatggacaatcaatgagttcttttaaaaaaattaactgatgttttcaaaaatttaattatgttgaaaataattaatatgtattctctctatgcttaattataaaaaaaaaaatatgtattctctatatgcttataaaaaaatatgtattctatataatagaagttatacactaaaactcaatacgtttggtactttttttaatgaataaaagatgatatgataataagtaatgatatatcaatacatcagacattaatttaaatatcatttatgttaacagtggatattcattaaactcaaaaattgaagtcattttaattttatcgctttcacatatatacaggtacttgaaaatggaagttgaatttttatttgctgaaggtttgttgctttctttttttccttactgcttgtttggtttaatgtttatcacttgtcgatcagtatttgatctcaagcaggagctataaatagtagcttctatttttctttcatgtcattgatgtgaaaataccacttctcaggtatttgatgtataacaaaacacaggcttaatctctctctctctctctctctctctctctctctctctctctctctctcttgttttcttgtttaaattaactgtctagactttacaataagcattaggcagcacaaaaaacaacacgttcaatattattatttttgcttcttttccaaataaggagtataaggctaaatgagatgaacttttgtaatttaaataaattgaatgagatgttagttaatttgattacgaagtgattttattgatttgtaaccagacctagagggagacatcaatcctgtttgatagttaaaactacatatcatatgatattctttcatttaggccttaaatgaaaaggataaatatatacgtccactcattgtgagataaactgaggtgaattagttttaaaaaaaatataaataagatgaaagataaagtaaatactactacatcttaatgagggttgaagtgaaaattagcattaccaagctttcccctcttattattctctgttaaaacttaaaactaaaagtgctacaatttcaaatttaatggtgcctcgtttctgaaacaccaatcattgtcatactagtgttaccttcattcttaattttcacacgtaaaattaaccgctgcaacaacacacacctgacaccattacatgttgcaaccgtatattctactttagtacgatctgaatcaaacagtgaaccttaaagcatcaccagacacaaatgaaaagaaaaagatcaatataactaagtagtaataagaaagacaatgtcacttttgagagatattaataatttaattaatttgatacactgatctttatgctattcctatcaactaagttagacattatttgaataagatgtttgaaataattattacaaaagttgatgattttcaattatatactaaaaaccaaggattaaataaaattacactgtaaaaaaattcattattaattaatatattataattaatttctaaattatgttcatgagccatttgtgtacctgagaacaacacaagcttggctcagaaacaaacttaagtggtaacaaagaagtgaattggatgtgtaggttgagacagatatcgaagctagctaatatatatctaattgctttttcttcggttttggtgtctcatttgtttgtatatggaaattgttaacttcattcttagttatcatgtgctcacccgcatcttaaacatgcttaatagtattaaagtgaagaattactgtttaagtaagtaagaaaagtgtgtcttgtggagagtgaaagagagaaagacgtacggtgaaaggagggaacctctttgtctgtaggcccattttggcttacaacttcctatttgagtgccattttgggagctgtcttagcacagttacttttgtctccctcttaattacctggggttgtaattttgtaaatactctttttgatcttttattacttcaaattactctatgaaattacactcttttatctatttcatagatgttttaactataatactttttattgtcaaaagttatactatttttttttcaagagataggtgttcattttattgtaaatgagtatttcaccagtaatttttcttaattctcaattcagctttattgatggccaatttttagacacctactatcatttgagacttcataaaataatcagtttgaataaacttttaaatctgacagtgaaaaagtgttcagattttcattttcttttgaaatgttaaaagtcaatagtaagatgctcaaaactatttgtcactgattaaaacttagataaaggaaaaatggtcctgtaattttatttataattactcattatttgaactcttaagtataaagaggagtcaggagtataattaggacaattaaatattttattaaaagtattttttatcataatatactttttacctacaaagaaacttattgtgtttgaaatcacgtgtgtgaactgtattaactgtggaaaccaaatccaataacccataagaggcataaactacaacatcttgcttctgaataatgcggatctgggttgacacaatgcttaagtaaacacaacttaaattaattaacgaaaagctattgatcactaagtgcgtagattaattgatggaaattgttttaaagttcgtttgagatccaatagttgacataggcgaacatagatgacaagttaatgtaaccaattcaaattttatactacaaaagcaaagtaaaagagtttgagtagatcattagctacctcaatggcatttcgtgcgtctgacttatttttctaatagatagattgcagctagctgtcacaatatgttgcatatatagcaaatctgagtcatatgatgattaagatgaaaagtttcttaatatcacatgaccatttaaaaaaatgacgttagttttatattctaatcttaaccatctataataaaatccaatggtcaataactcaatattcatttctcttactcttgcataaaaaacttacttttatatttcctgtaaatgtatataagattgtaactttttctaaggggaaaatttactgttaattcacaaaagtataaataaaaaataaaagtatgactttaccataccataaagcataatgtgatgtgaaaccaaattaatattatcaaaagataacccaacttctttgtagtagttctaaggagcaagtgagctactacaaacataaaatctcacaacagaaattaaaatcagaacctgcagcaggaaatttaaaacctttatagtgtaattaaaggcagcagcaacacagcctaacagcatgaactatgttactaacactgaaatctaataggtttagatgccaacaatttatatcataacgggcaagcacaaccactcatgactcattcaataagctgttctcatcaaactagtagcctagaacctctttccttcaacctataaaagctaaataatcaggattacaattagtgcatcgagtaacacataatgcacaaatgtgaatgaacatacaatttgtttattgagtaattagcgtgatcagatttcctcatccagaaagccacctgtcttatttcttatatatattggtgctgttcaagaatgaactaacagtgttatgatattaccatgacaaatttcaactaccaccttgtctctccttacatatcatttggtagtaatatagacaaaaaccacttttaacttttaagcacaaatgagtgcttacacccttattaattagactcaatgattttctgtaaacatgcacctacagaggttttctcatgcaaaaagttgacaggatcacatcagcctcataacaagtacaagatatttgtaagagtttatcttcgaccaattaataaattccaatttacagatgattcctctcttcgtttcgttttcatttttgttctccaatagatattccttactcattaattcagcaaaatccatatatatatatatatatatatatataaatgaatgtcttccttgaaggctccataatccttagcatgatgaacttgataattgctatgcatacttagtttgtgcacttaaatgacatagcaattatttaatttcttctcttttgatgcttcttttgacttaaaaagataagaatttagattcttttgagtttttatcttaagaatgctaaagttagtaattttacaatgttttgttctattttgtagagtttttggacacatcaacacaagaatggaagatgtatgaagaatttgagcatcgcgctcaacatgcctcagcgcgagaagccaatatcatgcatgagtcctaagtgcgcaattggaggcttagcgcttggtcacttaagtcggttggactttgcatgtgcgctcagcgtgcacatgcaggtttagtgcacattcattttcgaaaaacacgaatgtgcagcattttgaagaataaaaaggaggagcactgtactattaagggacaaatagtaaggcacaatagggaacgaaaacccactcacttagagtccttcttcttctatttcctttgcttcattttgtatttctgagtctctcatgactatgagaggctaaatcacccattgttgggggctaggcaaccaaacactcttgatgtgatgatctttactaaccattttatgctattttaatattattgcttcttttatgagtttattgtcttgtttatgatttgatcacccattcacatgtatgttatagggttttaatcattgggaaatgtttgtaccctaagaacttgaaggagcttctaggtaatccatgtttagggataaaatggtgttatttagccttaattatgcatctttattcttaaaacaaattatttgatgtagttcttaagggattaggagtgaaattaggtaatttaggctattttacatgaggaaacatggttagggtaatttagaggataaaggtaatagttggaataacgttaaatggtgaaaaatctctaacattgcatcaagagtagtttcggtaggtcgaacacccaacacgtccacaaaaatctgcaccaaacgacaatttacacctccaagcatttgtttttctgtctcttgcgtgtgctctaccttgttatctttatttacggttgaattttgcatgtctgcattatcacttgacaagtatatagtttagtcatttattagtttaaacttagatatatacaaactctgagtatagttaaagtctatgtggattttgacactcggtcttaccgttttactactacttagacgaattggtacacttgccaagtaattaacaaaactgaaactcagaagcattcagttcttgagctactacctcacaataaaagaaataatgctcaaacaacaaggttaatgtttctttcacattaattggaagtcaatgcttttgcagttcaaaaccatacggttagcaaattaaagaaactcaacaaagtttattttatatctttggtcccacaaaaacttggtataaacaaatagcattaagtaactaattaagtttccccaattaatagttctcatgctttcgtttcattttgctatatccatggatttaatgtcataaatcatcaataactagatctctggaagatccttttacacctaaaactcaaacaaatagttctcattagtatcttcaagtctctaaaatgttgtttgtaatttaaaagcaaactctaacatcaaggtggaattccaccttatttgaacaccccagacacaagtgatttgcttttcatctttgtacaattcgtcaaatttttaatctcactatatttctatagtcaaattaacttaagagttaccccctccttttgtcaatactcagtaggtaacaaattcaccataatcctcttgtggactgtgtacttctttatctataaagggggaaatgatgcacatataattaaattcagattttgcatccacgttcagtccaacaatcagtagtaaggcttacattttgcaaggtaatttacataagagataataagccctttcttatgtttttatttatgaaaattttaaaactgttcccttgctggttgtcattgtacatcctggatggaacattaaataaaagctgaacaacactcaagttgtatctaaacccttctgctttcacaaaaacctaaagggtagctctttcatgattgctatcctactcaatgccctctcctgcattaattgttcattcaattatcaaagcaaacaacaaccatctccttcatcttttctttctgggtggaatgacaacatggtttacttatgaattatgatccccgaagagcttcagaaaaaatctagcattgcctcaataaataaatgccaatcattttttaatttcttgttcctgtctgaagcaaacttaatctcatgcatttcatttgtgacttatatttatatttccccattgagaaatgtctgtcagtaacagactcttttgaatatactctttattatggattaaaatttattcaaaactcacaaaactttgctcatctgcctcaatcataattttgtagttttcattaattaaccataaattaaccatcgtatagggaatagagactgtattgctaacactcttctaatatcccccatttgaatgcataaaacaatttcagaaaaatattccatactcatgatggaggtctagttggaatttcttgttaccttcttgctgtatattgtgttgcagttgtttgatcctcggacttggttgttgaggtttcaattaacagtgacttggggaccttcaattctcttggagggtgcttgcctgcttggactgtagattctgtttcaacaaccttcaaaggttgaatatcaatctcctccaacttcttcatcagccaggatcagcaaacaggaaatgatttcaacaataagatgcacttgaatctgatcctcaatctgttacaggaaaaaaaaaaaaaaaaacacatcattggaagagaaaggaaaaaaaaatcaactgaaaaaatatccaaaatatggttgaagtttcaaaaataacaacaaatttcaacccaaacacctgacacctgctttgctcattttgggaatgaaaatcagcaaaccactgtgttacttcctactcctcaaacaaaaattgaaaaaaaaataaaaaaaaaaaaaatatatatatatatatatatatatatatatatttaagctcttccagaaaagtgctgagctaaaacagcaagtccatatatattgttatcaccaagtccatactccagccgaatttaaattatatttcattttctttactgaaatgatcccttgattaaggattgggggcaggtatcataataaaatgagtaacaaaaaatatatatcatgaatcatgatatcagtaagtaagttatatatgctaaagaaatagaaatatataaaatagaaaatgcatggaagactttccaaactagaataaagactaatttgatgaaattatatattataatgattataggcacataccagatgagtgaggaggattcgggagtgtagagggaaacagagaggtaagaactgaaaattgcatttgggtgttggaattggaagctaggcatgatgcaaacgaaaccaaactaccaaagtgagattagattagaattagacagaaagagaataatctgtgcactacacgacacgaataccattatcattagtgggtgggtcctaccttcttgtcgttttctttgaccgcatgcatctatgatgttttcagtcacttcgtgtatcattatgccagattgccacgccccaactatattcttcacagtaattatattcaaataagaatttataaattatcatataaaataatagttcatactttttatcataattattttaaaatttataataacagtgatatttgataaagttaaatgattaataatatttaactttatcaatacataattataaaactctcaaataaaatataaatattaaatttaatattatttaacatgtgaattaatggacagaattattttaatttaattaaaaaattaaatttaaattttaattatgcaattgcaattaaattaaatattcaaaaataattattaaattttatttaactcgaataaaattacttcctacaaataatactcataatattataaaaaaaattacatcatcaatcaattagaaaattattataaatataactttttgagatacttattaaaaattaacaatttatcatgattgagtgttcacaaatcatgaaatattttggattcaatatggtttataaattataacttttatgtaataataatattttacttttagatcacattataattgatatttaaagttatatttactatcacccaactataattttatctaacatatttatcttggaaaaaaaaaaaactctatctacctgaattaaatctgagtgtgtttatggtttggtctaaacatgctaaaagttggtaatttgcggtgtacgttactttaaagtttaaacaaacaaaaggtcttaaagtcaaaatgatgcgcgctgcaagaaactgtgtgacactgtgtgtgtgtgttagtgggggcgcctcatattctaagcatcgccacacacgacaccacacaactcgtccctttcacgcgcttcacgatacttccattccacgtcttttcagttctcaagaatagtatctacaaagttagaaaaaaaaaatagtaataagatatttggaataaatgatcaatttatccctaaaaaatagaaataacaaatttaatttataaatgtataaatattatgataaattggttccgtcattaagtcttttatgtttttgtcgatcctcgtgtacacgtgacaccttcatgaggtcaagtgataagacacgtcggatattcatcattttttactaaatagtcacctaatatttgacttctcaaaacatcctgttttggaccaaaatgacagttaatgtttggctcctcaaaacacaccttcacaagtcaaacatttagtgacaaattagtccacctcgtgaactacacctacgtcatcggcatcatcgtcacataccaacacaactatgtcaatgtctttgagtgcaaccaggttgtctgcattgtcattacgacctatcgtgacgttgatgtcacgccagagaagcttagccgcaagtatgttgagatcttcatggcccccgacattgtcctccacagcgttagcaacacctgccttgtcaccatgcacaacaagagcatcgccaagataatccactctgccatcgacattgagaacaagatcctcgacgacgaaacctggccctccatcgaggtccattccctcaagcaccaagctagcatcgatgtcttctccaacgctgccttttaattaccgtaagagatactcaagggtagtgacgaggtcaatgccaacctcgaccccgccaagccctaagtgacattttcgtccaaaacggtgtgcattagacgtgtcttgtcctttgaccttatggatgttggacttgaggaccaacagtggatgtgccacgttagttacatttgtgtcatgtgtgcacaaaggttaatggaaacagtaaagacttgatggtcggactaacttgtcacaacatttgtacatttgtggactaaattggttatttcatatttcaaggatcaaattatcataggatacatctttcagggaccaaattggtcatttacccatagatgtgggctttcttgtttcataactatttatgataggtaaaaatagtttttatagctttttgaaaataaatattttttaaggaaaatgttttctagacacctaatgattaatatgctacccaatatctagggagcgaaaaaaaatataggtatgataagatttatgatatcataaaaagatagagatgaagagaaattagaggtgttaatagaatgtttaaaattatgagtagttcatgtataactactcttttttttagggtaaatgaccaatttggtctatgtattttacactaattgtcaatttagttttgtactatgaaaatgatcaatttagtctacaatcatgtaaatgtattgacaatttagtcctaccttcaagtctccttcatttctgttaacgtttttggcaatgtggcacatgaaagacgacgtgacaaatccatgtggtggaagtgaaagccatgtgttggaccaaattgtcaattggagtatgtgtgtgcttttgccttttattaattcaccatttatcctcttcctttttacattttgtaagaaaaaggttgaattatgggtgctaagtttgctatgctctttcttgcctttgcatcatcgatgcccatgacgacttggcgacagatggtggtgtttggttggcggttgccgtttttgtttgatttcttcttatgcgttgaagatgaaaggcaactccgtaaggaaagatgttttttttttttttggctggactttattaatgacctccatttttgtaacatttctcatgtggccatcatttttgttagatttcttcctattttttcgttattgtaggcaaacaagggattaaacatgtgttagggtttagggtttgtcgatgatgctttgatgaactgaaacaatgatgctttgttttgggtatgaaaaagaataaatattattattgatacaaagatgctctgttttcttcttcttttgactctattttgtgtgtttccttttactgaatgtttgaaaagattaacattatgttatatcacaaaggtcgatttgttcaaaatgatgaaagggtgttggagtatgtacgtggagggtgaagaatgttattgggactctggagactgaccttatgtatgttttttactatctatgatacatgtgcgtctttaaattcacaatattgtcatgaactattttgtcgttaagttatattcgttagggatcatgttgtcattccaaaagaaaatattatcatgaaattagaaagaagagtcatcgtgttcttaaaatagtcattacctttataaattttaaaataaaaaaatcactaacattttagtctaaaacattgtggttgatgtggagcatctcctatacatgtggatttgtcacgtcatcaaggatgtgttatgttgacactcaacattaacgaaaacggatgaaacttcacgataggattaaattgtcaatatatttacacgacgaatgtaaagtacacagacaaaattgatcatttatcatttttttatgatacgatggtagtttttattaattatttttaaaattaaaaagacaaacttatttttttcttcttattttttaacctcgaactgtttttttaataattggaattacaaattttggttctccaatggaatctcaaatatctatataagtttttgattttttaggataactatgaaattaattcttaattcaaaattgaaatttatttaaaaaattataaaagaatcaaataattccttgttttcagtttaagtctagttctgtattgtaaatccaaaggctcatgttgaatgagaatattttaagaaattatttttctaccataatgtttttagaagattttcttatatgcaagtgtttttagaagttaatatcgcattcagtgaatcataatacagtgaatcataataggtcttatcttaatctcgtataccgaatatttaagaaagtataaataaaaatgagaatatagattaacaataaaataaaaaagtttgtattaaaaaattataaattcatatttaagaaaaataataaataagaaaaagacaaaaattattttgacgaatcaattaatctcttactcatcacaactagttgattatctggagtgatctcgtcaaaataattaataaccatgaagttagacaatttttttttatatatatatgcactaatacacacaccttattcagtgattttgaagaaacattgtaaaaagtattatggtcaattaataaaaatgaaaactaaatttgtaaactaacttacatttttagaggattatatacgtctttggataattataatgtacaatttcttcttacaagctagctttaattatcatttatcttaatctatatatctaaatttgtccaatttagatgcattctatccaggtatattttatgtacaaatgtccagattgaatacatcttattcaactgcgaccaacctgcatgcgtcctgtcttagaccatttctttttaaggtctcgatcgagtacatctaaagtatctaatcaaggattaagctatgctttaaagagtaatcttagttcacttagatttttccgtgcatatattaatattaaaattatttctattaagtattgcagtgtatatttttaaaaacgaatttaactagaaacaaatatttaaaaataaaaagaatcaaagttattgagatagttaatggtgagtggtgtggtgactatcgatagttgtcaaaaacagtgataaacaacagcatcatatttttttttcatgtatgagtttgtttattctttctcatgccttgtcttttattttcaatgaataaaattagatggagagaacaaatttaactttttattttatttaactataactaatattttaacttccacgatgcacaagacaaacgtttatttttataatatataagtaggttctctctctcttttttcttctcattttttaaattttacattatttttactttagtttttatttatatttgtagagagaaaatttataaacaacagcatcatattttctttcatgtatgagtttgtttattctttctcatgccttgtcttttattttcaataaataaaattagatggagagaacaaatttatacgagaaaaaattaaattatacttttataaactactctaactcttgcaatgttttatatcgcttttataaacataattttttgtttaattatttaattatgtaattattggaaaataggagaataattgtgatgtgacaatagtatttgttttgaaagtaaattttggccttgatccagtttatttttcaaaatttacatagtcatgtatgtaggtttgtgaatttaaagaaaaaaagatataaaaatctcataaataatgctcaaaagattcaagatgataagaggaggataaaaaaatgtttttttactctcaaaattgaagttgtcaatccttataaattattttaactactgataagttcttttaaaaaaactatttcattttaatttaaaataatattataataggatttgttgaaattgataaacaactaggaaagtaaagtatatataaatagtaaagtatatataaataggacaatagttgtttgagataactttttagagatagtatgtaaaatgcacatttaaagaagcgcaatttttttatattaatttcattctttaaaattaaatttgttgcatatatagttggtaaaaaaaaatcaaattcaacaaattttatttttattaataactatgggtactaacccataggctaatgcatgctcccctattctaaaatgtatcaaacttatcttgtaattgggtctcttgtagtggactttattataggtattcttgattatcatggactttcaacgttttaagtcaaagtagatcgccttagtgatgtaagcctctaaaatttactctattttttatattaaatttaaaattgtaatcatatatgataattgtaattaaataataatgtaaaatatttttacattattagtgtattctaattattttaaaaaaattataaaagttgcaactaataaataacaaatatattaacttaaaaattaataataataataaaaactaacaaaaaaccacaaaccaggcattaattgcgatttcgaattccttccccaatcaaaatagttattcctttcttctaattgcttccttgttgcctccctcaccatcataacttaattgtatgccatggcctaatttgattgatgaatgaatcaatggatggagttggactcatatcgaagcatctctcagtgaacttgtaggcaattatttagtttcaaattaagtaagtaatcatcaaatatttaggaaaagtaaatacaatgtttaaatattttgaagtgtctcaaaggacaaaacattttcatacgaagaacactgatatacaattaaacaacaaatacgaacacccataaaaatttgatgactaaggggtttaattttacgcatgaaaagataaatatgttattttcttcgaaaaaaaagataaaaatgttcattgctcaagtatatgtttttatctgtaaacattaaagacattgtcaaaaaatttacaacaattcatgttattgtttaaccaactgagctagactctctccacagtatatttgaatatgtattcctataatttattttgaatcaatgtaattttctaaaattgattcaaagtaatttacagtgatatgattttttttttttggataaaagatatttaaaaagagactttaatacacaatgttttgtttgaaaacttgtactactaattaagattgattttgagtatgtaattataaaaaaaaaattaagtctaattaaaggtatatttagaacagatgacataattaagaatatactttagacaaatatcgtgactcgaattagtattaatgtaaaaatatttctttaatacttttaatgagacttgagtctaaaatttataatcatatttttaatacaatgtcaaatatcatggtaaataaaaaaaatatttgactcattatatattcaagttaaggcatgtcaaccaagaattcaaatacagtcaagagtacttgttttaatatctttcttgataccttatattatcgttcattttttttactaatgtttcaccttttgtttggatgagaaaaaattaaacgaggaagaatagaaactttcaacatttgaatgagaataatttgttacttgtttttcttcctatttttcagatacataatttttttttattccctatttttcagctctaagaaggatgttttatagcaccaaaaagaaagaaagaaaattcactctatttctcgtgataaaatagtttcaaatagttgaatatttaatgagggtggtgagtgtgttttgttttagagaggttgagatttgtgttttcagagaattatgaaaattgaattaaaacaagagacatatgtattgtaagttgataagaattggattaaaataagagacacacaaattataagttcatggtcaatgcaagatgtaaggagttgtcgatcggcagcaaattattatacaaaaaagattatgtcgtatgcaaaattaattataggtcaaattattatctgtttctttgtcatttttcatcttttttacacggaaagaaatgtgattgaggcccgccactttattttaatttattttcaccatatttcataaatattaaattgacttttgttgttatatttcatttttaggcctctttctcgttgtttcttttgccatttccttgccaaacactgagaaaaagtgactctaaattaatagtaaaactctagaaatgaaagtattaaaagaatattgactcttattgttctctcctatatcacacctctttcttaccgtttctttgtcatttgttcgtcagcaagtagaaagtgaaagtgaatataatttcataaaactcaagaaatgaaaatattaaaagaaagaaagaaaattatatttaattttgctagtctatctgttgttgttacatctctttctcattatttctttataatctctgcccccatgaaatatgaagcaaaagtaaatctaaattagtagaactcaaaaaatgaaagtattagaagaaaagaagaaaaacaatttttcttctgttattttctcctatctgtacacatctttttaaaaaaaaggaagaaccataaagattaagtagtaattgaaatttgagtttctcctaaggtagtacttattatttaatgtataatgtcacatgatttatgatttagttctttttcttattatttaagtggacctgaaaaccatgaaaaataacgcgttaattgtatataaaaaaaaaaagaaaacaacgtaagtaatttggaaactatttataataatatattttttaaaaaaagaagtgatattataatggtagaaagcgcgtggattggtgggtgatcgcgtatggtggattgtttgtggtcttatggtcttacagcagaatctttgtttcatataagtagacgagcgtgggcatataacactacaaatctaacattagcatttaacaaatactaccatacaatatacattatacgccccctttaactatactatcatttaaatacatacatcgcttaaccttcggcgcagcacccaccagcaaggcaacacacacaattcgcaatcacttttttttttaatttttttttaagatgaaaataatatgcatggaaagaaaagaataaagcgcaagagttgattagcaataataaaataattaatcagcgaaaatcaattacagtaacaagcaccaacattaacattataataaaacatgagtgttaattaaataattaataaaatattctctcaccttcgtttcttctgtatctgtcgtctctctctctctctctcatacgtccctatcagtcataaattagggaaaagcaagcagacagctacacacaacactctctcctattcctcctccttcttctcttctggtgtgagagcgcaaaacgttgattactctctctctctctctcatctaatcataatcatcgatgttcctcttttctcagtcttcttcttcttcttcttcttcatagtctctcccttcttgtaatcacttatcatggcggctacgtttgatggattctccataaggtatatctatttttctattatctattgtttgtggatttggttttactaatatatagaagcgcgctttataggttttgattcggtgttgctgttgcagggactacacatccaagatgaggtccatcgacgttttcaagtgctggccgttcgcatccacctcctcacgtgacgtatcaccagaggaggttcagtcgtggcttccgccgatgaacctgtgccctagatccggcgattccaacgaacgccgcgttcaaaatccggagattccgccttctgctccggaagtttctagaaccgatgacgacgacggcgacagagattgcagcgaagatgaatctgcagaatctatggaatccgagaaatccgcgcctccttccgactcctcggcggcgaacaacaataacaacaacgaagacgagaaactggagatggtttgtccggtgtgccgcgaattcaacgccgcgacgctcacggcggtgaacgcgcacatcgacggatgcctcgcgcagacgatgagagaggagcgtcgccacatgaggattatgaatttgaaatcttcgtcgtcaaagtcgaagccgccgaagaagcgttccatagccgagattttcaaggtggaggagcagccacatccgccacagccacagccacagccacagccgcagcctcagccaccgccgcaaatcgagagggtgttgaagttctggccgttccgcgagggcgaggcggacgatgtttcgattaccgttacgaagttcgagtggctttctcggcggctggaggcgctgagatccacgcgcggaggcggcgagtcggcgaaatcggaccaaggagattcctcggaggagaagatggagatggtgtgtcctgtttgtcgagatttcaacgccgccacggtgacggcagtaaacgcacacatagacggttgcctcgcgcaggccgtcagggaggaacggcggcagatgagaaggtcgacggttaattgcaagcccatacctaaggcgccgaagaagcgctcgatcgcggagattcttacggtggcgccaccgatcgaagccggcaaaaggaaagcgattcaggttgaggaagaagatgaggagaaatccgattatggctattcaggtggagattcaactagtgccgccactcctgctgctgttgctactcccgttgcttcggtaattaagaacaagaagagtacgatgaagaatagaaacaagaaaaagttgaagaaggtgaagaagaagaaaaacaaggtggagaagcacggcgatagtggtgtgtggttcgtgaacaatgagaagcagacggttgcgagcaagaagaagaagaagaaaaaaaagaatgtcttcaacaacggaccaactgggaacaaggtatgtggtttgtgtctcataaaatataagttaatcttccgttatttgctgtgtgtttccgcgatttgcagctaattcctggcagataagtatacaaattcatggaatttgcgcataaaatattacccgacactgtagaatgtagattttgggttgatgtagtttcttatgccatgggattatagctttccttactctatgtcttgctttttctgcataaaattactgctgaaaaagctgattagagagagagcttcacatatttgtggacgaaagtgagtgtttttcttttggttgagtacttgagcgaaatacgcgacaagtaaaagttgggaaaagagagttacgaaaaaaggaaaactgtgaccagtgccttcgtgcgcggaagggattcagaaggtagtgaagcctgcaagaatgttgctccagctgtagtgtgtgttgtgtgtataatcagtacaagtaccctagctagaaggggccactcatgggttacgaggtagaagagagagctgagtctaatgatgaggggtttctctagccccgtcactattaactaataatttgggggggaattatcgtatgtgccatgggtagatcaacagattctcatgtatctcttgtggccagtttttcggacgtagagaggttttatacgcagcttacagctggatgtattttggcttgtgggagatctgcaagtggaggtccagaatttgatagatcatttattgggtctgtcagaagtgtatatttagtgatttggattgatgaatgttcgcatatgcaatttccagatgggcatgtatcgtcaaaaaagaatactctgacttgggttgatatagatcattatcgcatgggcatattttatggcgtattagtgaagtagggggtggtgatttatggtacgtataatggttttggactttctgtcgttgtgtgagacacctgattttatattgtgaaagtgttcgtttttgggtagaatgacttggatgtatcggtcaacataagttagcgactcatgttttgaacatgtgcagacaattttgagataagatctaatcgatgtgagtgtctattagaacccaacctaggaggtgtatatagaagcaatagaaaaccgaaaccaacgtcagtttgtggttacgctggccgaaatttgaaagtggaagtaaagtagtcaaatatttaacttggctagccatgaaggttactcgatgatgatataaggatgatatgatcttgcagccaactctatccttagaagtgaaatttataacttgactgtccttactgtatcagtaatggcatcttattatagtgtctagattgttttaaataacgtttctagactaatcttagtaaatactttattatccaaaaataattctcgaactctggttctatatttttcctacctaccatttcttttacaagattaaaatatattggattttttcggcattcagattctaaagaaatctcaggtttcgaatggggttatctggaccacgtagatttctacagaggtgtatcatatgtgatatgtgcatttctagtttcaacagtgaacaattacatagcagtctcaaattcatgtaaaaaaattatttaagcatcatgattcatgcatttgccattgtccatcccctccccttttaatagaatccaatatcccactaatttttaaaatttaatttaattaatttgcattttaaattgcctttctaaaagaacgaactaagtaagatatttatcgtataaatattttacaataataattttaacctcatggtgatatcgtttaatttcagaatctgtaatagttgtttgtcctaatactatttgctacatccatgcatgtgtttttcgttagcttcttcttcgtataaacaatgataagaatatatatgttgttatagaattacactttggatatgatattttagattcgcaaagtggcattgtagaaggtagaaattttgttacaaaaagggttgtctttacaattttgtttattttatcataaagtgtaattgcaccttaccggatttttaatatcttaatagcatataattattttacgccccagctttcagttacaacgaaattaaaaaaaaaaataatattcgttccaaattctacaagcttgtttagcgttctgtttgttaagtaaaatcaattttagggatttgtactttctatcaacacgtaaaaattatcaataaataagattttgaattgaagctctcatgcattcttcatgctgatattcatatatataattatacattcatctagcttgatatatggttatttcatgtatattcactcgtaaagatttaaaaatagtagtatatttgtaccagaatatataagctcaaataaccttgtatttattaactacgagcatttctgggatgtattgattacaaaaaatttcaattgtttttcttagtacctaagtttattttatggctacttaaatatatgatctacgcatttatgatatatacatatatagatttctatgtttcccttttctgaaaattgatactaaaatgaccaagtttaagaattttgttttaagcgtttctgaaatttcttatcatgataaaataatgatataatttcgttcttaattcaattgtttcaattttataaacttctacatgtagttgatcttaatgtatttcaatttgatttgtttttaaatgaatgatggagtacttaaaaccccaattaaagtgttattcaaatgtcactaaagtcttttcctaattatagaaaattaaaaaaatttcacttaataatcaaagagtttctttatccagaagtttggatcgtgattttataattaacgctggaaatatagtttgtatagttccctgaaactttccatggtgaaattgttcttttgtattaaatctacttttacttgaccataaattccatttgaaaacgtctttgccgttttatcttatgtagacacaagatataggcatgaacgaagttgcctcaatctttcacaaaaagctttttgatgagggacaagaattataaaaaaaactgaaaaaccaatggtctgagtaaacttttagggacattcatctttggacatcaagttattgtaaattgtaatgtagcaacagtcatagacaattgaaatcctttcactatttctgattggaattgttgaaaggatatgaaatgctaattttctacagtgtctgtttcataaacagacattttggcatcattatacatgaaactgttgtaattttgtttattttcttgtaaaaactacaacatgacatccataaaaaagaaaagaaaggagaaagatataaaagctacaggctacaagaggtgttattatatttatcttcatattttgcatatcctaaaggttagtcggcttattcttattttattataatataacattcataattttattaatcttgtctatctcaggatgatgtttacgatcgcatggtgcgaagtgcagtaaacagttccagaaaactaaaaggtacaatcggtaataaaatgcttccacttcatgaggttgatccttctatcgatagaaagaaatcaggtataaattgcttatcggtaaaaaagaagcaacaagttaaaaactgggactcagttggaaagcaagaaaaagcagtatctccttttcatggcattcttaagaaccgcttcaaacatgtttctgaaaagacgtcaagtggcagtagtattggagatggtgctcaagaaagctattataatgatcaagaggcaacctcggacagacatgtgaaattctctggcaaagatgatatacttggtccaaaaaagacaaattcatttgatgaaaccatgttcaagatatcttcagatgcggtggcatcttcagtagtaaaggagaaggcctctggaagtgatgaagaaactgcaagtttggagccaaacagaaattatgaccatattgacagaggcaagagagaggaggtttgccctatagttgaaagtaaacagttttctaacactctggaccaagataccgtacaaagcttcttgaagccatgtatcaatcaagagaagtcaaaacagttagaagagaagtcagaattgttgactaaggtggcagtttgtgacaataatgattcacagtttttttaccgagggaacagaaataccctgcattgttctccgtatgctgacatttctagacctctttcagcagtccaagaagagcagatgtctggtataaatacacagatgtgtgaatctggatctttcagctacagtgggaagttcaaccacttggatgatccacaggttgatgctgttaactcaaatgaaaatacaaagacatttctggagccttcttcatcttattctgcttcatataatgcaaatgaaaaaccagaatcttcattgcaaacttatggagataaagataacagtggcgaggccttgggtaggcaattttctcgtatgttttctgcagatatgattgataactcattccccaatacaggctgggagaaaggaagtggcaaaaatagctgtttggatccggatttttttggtttgccactcaattctcatggtgacctaatcaatttcagttcaagtggaaacttagggatgaaccagtcagatacatcaagtacgttacgtggttcttttagtggcttacccattaataatattctccatcaaagtaaccaggaaaatttaagcattaatgagaatcatgttgttcagaagacatttccaaaagatagtcttaatccatttcctcatcatccaacccaattacctgtcactgagttacaatctagagagagagaagatatcaaccgacctaattcttcagatatgtgttccagtcactatgtcccgccacttaattcagagttgaactgtaagaaaaactcgttcattgaacagaatcaatgtgaccgggtctggaatcacaatggaaatggggtgatttctctgaaagaaggttcagatcatatctcaccaagttccagccaactaacaatgaggttgatgggtaaagatgttccaattggtagaagcagccaagagatgcaacaatttgcagatgtttggcctgatgaggaatccagaagaaggaattattctgaatatgctgctttagatcactctttattggaaagaagttctaagcaggaatgggtatctggttcacctatacaaatatcagctgacaatgtattgcaagcagcaaaaattcaaagcaatcaagcagcacaaggcaccatattgatgagcagtacagactctggattctctcaacagtttattggtcggcaaagtaatcatggagtcaacttcaatgccagttcttatttcaatcccattactcaaaagtctacttatgcagtatttaatggtgcatccaatgacttttcagagcagtttatacctggagctaaacctctaggaactggcaattttagtcactcgactcatgtagccaatggtgagctgaatgacaggaacaaaaatccccatgttacaaaatcagcctttggaggatttcctttcttgcagccaactgtgaatgaacaggccaaaacatcttggtttgatagtccctacagaagttcaccatcgtggttgtcaatctcaacagatgaaatgctaccagggatcttttctcggcaattttctgcttcaagtagtcaaaattttcctcaaaatctgtggggaaataatttcactacgccatttgtgaatcattcagcagaagttcgctttccttctaatcatctgacttcttctctaggtcccatgcagacgactcctctttctccagtatcaattggtcatccactacatgttccggttacaccctctaccataaatagtggtaatataaacataaataaggtcgctgacagattgaagtttgatgaccatcagctgtgcacaaataccagaaagagacctgcagctgcagccaatcttgatgattccagaaaacctaccaagttaccgaatatacgagtgcaagaaaacttcagtcgtatgactaggttgcctggagaaaagtcaagcgtggaattgcaacgaaacacaagagcacttgaactggatccgcacatgggcagtgctaggagtaggtgttgtcagcatgaggcacaaaatctaaatcctggaagttatcctgctgtaaattcttttaaactggacggcatggtaacatcaggtcctgtccgacttggtcctaaaagagcgaagcacatcttaaattcctcttaaaatatggatcaggatgacaagctattctgccatattctcacctgcgattactgacagtgttagtgatatagaaattcagagaaaattgactaaagtatactgattttaggtgtaagttatatcattttatcatatctgcttttcctcctccatagtatatatccatttgagaacataacaggattgtccatgtatcaatattgccaggttgctgaaaccggtggaaaaattgatataattccatccagtctttcgatacatccagctctcagttttgaagtttatgccctttacagaattttgtctccaatgaataatgacgctttggatatctatttttgagccaggtattccccacatggcatctgttcaatgactatgcaaagatgtgcttattactgatacaccagaaaggaaagaaagatgggctttaggataagggaatagtccatctctcttaacctattcaataaaacttgaatttggggctttagttattcattaaccattggatacttcctcattaatttgaactggcaaattatgaagaaaaaaaaattctaccataccggctttgattatttatgaaaaaattattatttttcatttaaaaacttctaaaaaaaatatgattacaagctgcttgaatataaaaggttaatccagtgaagttgcttttgatggaaaaatagtttaaatttgttttcatgtcttaagttgtgagagaatttaaactgaattacgtttttgtaattgttttaatatattaaataaatcaatttgactaatttattccaaggtcaattactaaggagatgttacattgatgaatttattaaatttaaacggatttcatattcatttgagtcaaaatgagctaatgatgtgtcagatattctttaattgccggtacactaacgcttattattttattaatgcaacacgaaataaacacaaaattttatcaaaatccaacaaaaaagttagtaggcaaagtattgcagtcgatcctcctgtttgattctctgtcttgtagatcatacttctccaagtattgtatcggccaaacttttttgtattttaaacttaattatgtattgccgaggtggaagtgatgctaataagtaatagaaaataataaccaacagcatctctgtatgaaaagtgaaaataaggagggggtgaagttgttacgttttagaatgtttccacatataaaatcggaagagtctaggataattcatcatacgagtgcatgattttatgtttcaatttttgttttcttcctgattttaattattatctgttaaaaaccttcattcaacacagtatcagttactatatagtgtatatgcataaaaaaagttacaatatagtgtatatgcataaaaaagttactatatagtgtatgccaaagtgttgaaggaaaaaggttgatcgaactggttttattctattataagattgggtttccgccactttaatttatacataatgactattacgtacgttgctttgtttgaagatgagtattacccaataaaggttgcttatgaaagcattatggtttttgagatcgtcaagcttttccattatttttatcccaattaagcatgagtttgtgggtacgtgtagttaatagttatgctgaaggaacttagaggaaaccaattagtaacttgcagtagaattctcgttaaagggtttaaaggatttagcgaaaaactgaggtaatttaaccaaataatttttgtttcttaactaaatcagaaaatgactatatcaaactagatcgaatgctcttacgtacattcttaaaccatggaaggtacacataaaatatatgaaggatataatcgctgccatttagtttaattaaacaatagattcctccgtctccttcatgttaaaatatacaaagaaagaagtatcgatttcacaatgttgacgttcgtttcattccaacttggtcaaattgatagtccctcactcatcgcttctttgcttctttttcagcctgcacatatgaaagttaacaaaaaattgttaaaaacacagatatatagatgagctttacgatgaagcaattcatagttgttttgtatcataccgctctgactactctatcaaaggcatcagggccatatctatcgttatagcgttcaactgctttccttgcatcgaaggtcatcatgtgaaggaccttcttgtactcctcagaataattggaacttccaatattctttatgtattgcctcacgtaattctcatatatgtaagccgctccattgaacattggaagtaccaaccagacgcaaaacataagcttcaggtatccccaaatgggaaacctgtatatatttttatgccaaagttcaaatattaaattactattatgtgcctctatatatatagtttgatttgacttgaaattgatgtcaacgtaccaagcaaggatcttatgagtggaaagctcaaagagggtcatgaaggagtataaaacccaatacgttagccactgttgatcatccaaggttgaaggactttcaattgctctcattgatgcgtatctatgatatttactcagaagtagtcaagaatttgatgattagtcatatcatgaaataattaatacagataagataatgtgcatgcatgcctctgcgtaggatgcttaattaatttctttttattgattgttaattaagaattacagcagttaatccggaggaagagaaaataatgatacacgattgcatgataatatgatatggcatttactatacttacagaggataaagaagcatcactccaggcctggcatgcagaaaacaaaaaaaaaaggctgttaattattacggggaaaaccataaaatgaaaaacctatagttacagttgtgtgttaaattgcagaatacatattatggtgaatatttttttattaaatgagcattgtacatgggatttagcaggtattgtgtgaaaagtatatattctgtaaggcgcagatataatatagcaatgcatgtgtaggagtggaatgaaataaaatatatatacgacacaaattacagatatttttaaaagcaaattaatggagagagattaatttgttcaccctattattgtgtccaaatgtcttgccattgttccaaggacacccatgatgtagaaactgcgatattcagatatttcctggtggggaaattcaagttttaagaagatttgaaggaatatgggtggtattgttgatgcatgcaaatatgtatatatttagtgtagtagcaggtgaatgaaggaaaggaaaggaatgtttgttgaatgacccaaaagtcttctttttctctcaagagaggaaagagaccataaagattaaggtatactatatgtgtaacaaaacgggaggggaatataaggatgccaaaactttgggatttcatgtgcctttggtgcatattcgagagttatcgtattaccttttgagctctaagcttttgtcattgtggcattaaatgttaccaaggtgcctaccctttcaattgtttttcccagtctcggtagagttgcgtaaaaagttctactactacggccttaagcctttagtatataggacaaaatagtacccatcaaattcaatttaattgaaaccctacattaatagtattagggtcccgagagaatctactttttctctcttcttcttaattttctgaaatatgtgtctatgtatacatgattttaatttcctctttagtgtaatatcagtataaaaaagttttgtgcttgtacttaatgttgtcctgtcacattatttaatacaatttgctatctcttcggtttattaatatagtacgtcaaatgttaaaataagatttcaagcaaacaaataaaatgttaaaataagattgaacgatatcaagaaagtgctttgagtcactagatcttgttagtgaaaaggagtttgaataatttgtagaaggtgacaaattcaaatttcattattatcattatacgaaaattatcttttattaaaaaatatatacaactatctaatgggaaagtgagaaatgagaggtaacatgttgaccataaatatatagtaggtggttaggattatttgacttaaatttaatcttgataatccattttaataatggtcagaattaaattctttcacggtatcatgattttttattttatttttttggtatggtttccagcttattgcattcaatacctctttttgaatgctaatttcattattataaattgatcttattaaacacgtcaagtttataaaaaaaattgcacaatttaaaaatgaactaatacttaatcaaaaaatttcatttaaactataatattttttttaaatataaataaatactataatattgtatatatatgaatttttaataattgaatttatcaaattcataacaaaaaaattgtgtaatagagcaagggtattggacttttgtcataaatgatcccaacaacttgtatctatgtaaaacattttctatatagataagaaaaaaagggagaaaaaaagttaaagtgtattgaaatttcatgtttgaataaagttaatacgttattagtaatttttatccactcacggttccattaaaaaaacaaagattaggcactgatcatttgatcatcggattgactctaattttacaaaattaacttcgtatagaatcaggcaagacgatttaatatcactaaaaggaaaataacacacctatacatctatgaaaaaaattttctcaaatgcaatcatgaacataatattgtatcccatttgcttgctacttgctacttgttatttcaagggtaaaaattccaatacatctgtttttctcttttccctaaagtgatgacatgaattgtacactcccgtttttctcttttgcctaatagagcccgatcaatacaagttacagttagtacattttacacacacacaaattccaaaagattcaatcagaaaaaagtgaagcggtgattccaaaattaagaaaatctaagctgattcaagcaatatggccagccaaagtaattaagaatcttgacatgcttcttctgcccaaaaactctagtcccgatgggttggccttgcttgtccacaagcaccacagcattgtcatcaaacttgacctcactttcatcacaccttccccttttgcatgcatggccgcacgcacaaccacaccatacactaccttttctttcttcacttttccattcggatgtgcctccttcactgatgttattatggtgtcacctaaccttgccctcttcttccctttcaattcttgaatgcacatcgctcatgagttatcaaccaccttcagaaccgttcccatctgtatgaacttgcgttgctgttgctgctaaagcaaaacaatttttttcattagtcagtcagtcattaatccatgtctggcatctttgcattacaaggttgtctacaacgtcaaatgactaagtttagcaaaggtaagaaaaataaataacatgtcattgaaaataggacaaaacttacatatatagttccttagatattgttcgcgatgcactgttctcccattagaattggagttttatcttgataatccgtgtaatcctttaatgcaaaacttactactagtagattacggaagtgaaactgattctaattgaatgacagcataaaaaagtaaaacacctaaaaaacttgacaagtattgtccttaaaatatcactcatgatcacaattttcacaactatgatattgccataattcataaactgacctgagataagaaattgctggatgctatctcatgcgatgttaataaaccatagaagttgttattccttaatccaccaagcaaagaacggtccactagtttggttttcagcacatgaatgaaaccaaagcaagttaattactacttcaccatgcaaaaatcacctcatcaacatggaatataggagtaaattttttagagttataataattattagattttaagaaactaaatgattagaataaaaaataattcttttaaaattatttttataataacttgatatctcctttttccttccccactctctctatatataagtggattccctcccaccatatatatcatgtcaataaaaatgttaggggatctatccatgacataatgaatgcaatgcatactttggcctaccgatttacacaaagcttaattaatatgtgaaatttcacaacttcagattgactattataaagcgcaattttttcatcagaaaaaaaagagagctcaatagctatatactgaaggcttttatgaaaaacaaggagcaaacacaggggatgaagcagaataaaaaagtaaggacttacgaagagtgcatcttgaagtaagggttgcagcatggttgaaaacctgctcattattgggcctccattttttggtttcagagcataatattattgggccacttaaatctagcccatactcttataaacaatgcaaaagaagccctttagccaacacatttaattcacatcaattttactcactctactccttatcataagagatactttaagaaaaaatgaatgatactttttataagagattttagaatttttataaaatatttaatttttctttcattggttgatcttatcaaatattctaattatgagtcttgttaattagtgttcttgtaacattgattaataaattaaaatgagtaagtatttattacgtaaaacataggatatcattttattttattttagttttttaaccaatattccaaagacatatgtttaatatttgtcttttaagtatttatgttttttattgatagtgatttataatactctagcattttaatcttttcacatcacccataacaagttaatgattgttaataaggacataattgacacattagtagtattttttttatataaattcaatagaatcaattgaattaattaattttattggtttgtataattgatgtccaaaatgttttatagtaacaaggaccagatggagtattgtttaaatatttaaatatcaaacaagtattatgaagataaaagaagtttatttccgtttcttgaaattatttgataaacatataaatttaatagtaaattatactggtatatttttaataaatcatttttgttgtgtgtatccatagaacattagaaatagagcaaaatttgtcaatacaaatttgttcgttgtatgtagtttgatttgtagattattatggatctttccgtgttgacagtcaaacatatcctattaaggttgattaattgattttttttttaaagatcacgaaaatatctttggtcgtgaccaatgacgataagctacacaaagaaaaaatgagggattggatagaaaaagttatttattttcctttccttttatgatcccaaccaacaaaaagaaagaagaatgagggttgcaatgttgcaagtatacccccaactaattccatggtcaatcaattcaaagcaaatgcaaaaggataatatttaaatgacgttaacaagttgtttcgtctcgcacgtacacggtacacatttttttgtttcctacaaaatcattccacccatgccagagtgttgatttctttgtaatgagattttcaacaattaattaattctcctgcttcaactccttacgttgtatttttgagtcgtggtccctcacctaatcaatcatcaattggctactagtgttttaggaattttgacttgtgcttcacaaatcatagctgttaactatgatcacaatattgctgttgtggtgtggtccatacatcatgtattcattggcatgactatgaattaccggagtagacgatgtagggcaattggaagacaacaaattcgggtaaagcatttttttttctgacttacttttactagccattcttaacatattatcctatttttctttgtcaactttgttttctccattgggctttcagacgcatatgtgcctcttctgttcgggatacaattttattgttgtgccccgtttccattttactaactttcatcgatagttccaaagtttttccctactatatatcctctcttagaaccttcagtgatatggttctctcagttctattacttctattattatcattataggattttactgttcttatatttgaatagtaagtagtccactagttacatgttttacttgtatttgttattataatatttttaattgtggatttctcggcggcagcttagacaccataacattccattggttataaccttccgtgtgtagttctttccgaaacttcgataatttgttttgattgctttgaggatcaatgattgtccctataaatcaacacaaaatttttctgcacgctttgtcctcactacaacgttttccgaaaaacttcttaaaatgtcatttcttttataactatttcaagtcaaacacatttaactgtgaaattcttaagtgacaaactactaaaaaataaatatatcttgttggaatagacaatatcaattaatttctttaagtcatcatcagctgtataatctcatatgcacaacatttggatctatctcattttgatgtgattcgataagagtgttacaattttagtccttttagtcgattctaacttatttgtaatccacttagaagtagcctgctcaattatcattgtcctgctgcaactatatatgcatgatgaaatttgtaaaagaagttcaagttttttggtgtactcaaatagtcaaataaaagcaacaacctcatttctggcaaaacttgtataattgtattgaggcagcatatctagcatgttcaatcctcaattgtcttaaatttaaaaatccacaatcatcattaagattgaatctactccgtaagcgctgactttaaaaaaaattgtgtgataaaatttaccgatgatgatcaaattattcctctgtggctctgtccattaacttcttatttggtgagcagtttgttgaatgtattattcaacgtacaagaagtaactagttttttggccagaaaattgtcaaaggcatttgagtcaactacattccccattcacattgaagcaagattttggtatacatccaatacaatgtatggatggttactgaaataatgtgaggctttgcaaggaaataactagcatctctaggaatcagtgttcaacgcaagtaaaccattttcagcacatgaaagattctcagcaatcatagttgaagtgtagaaatgacgtgtatgtgtttcaattcttgttcttgtcctacattcttcactctgtcccacctcaaaaaaatccttgatcctgatcttttttctttttctaatgcgagtataaagaattggttttcatgtcgtcatcaatccataaaagataatacttggtcggaaaaatatccatggagacttgagtcataattgacacctaaaaagaaaattagagaacagagagaaaggcgtaaatactattgttgtttatgtttagacacccactatattcaagcgtctctcatttttgtcacatcttatcactaattatttatctttcttcttttcctaggttatcactaattcagtcgtaagggataccaaatgttaatttactttatcaaacattattacttgctcgtagctaacatgagaaaatacttggggtaatttttcacgttaaaaactactgcgtgcatggtcttaccttctaactaatttaatcaccaagtgtttatgctttcatagaccttctgatttatattagcaagtattggaaattatttttctctgggaaatacctgttaattgtcgtagttgtaagtgttgaatggtcatataaatgcataacaactaactttaattagctctcatgtgatcgatcagaagttgtcaagaaaaagatgattgtatgcccaaatttcagacaccatgattatgagtaggtatgaaggaataattgcacttatcaatgggttattatcaaaaccctttccatgttagaacaacgtggtccttaaagaagaaacttcaaggattcaaatttccttttatgatgttaggtcacgtacgtaggaggctaggacatagaatgtagccttaatattggcattaaattgttcagaacagatggcatatgcatggggaaatttgaatttgtaaggttcaacaaaacaatggtatagaattaaatatatgttgctagagaatgaaatctaaataatggctagggaccattcacactgcagctaactaaatcgatgaatatgcatgcctatgaaattattagatggcactagttactggcaagctataggcgttcccgcaatacaatattagtttacattgtacctaaaagaaactcattattgcattaccaaaacttctactcgagtgtttcgttcacactattgtgatttgagttcgatcatcagatttttattagtaagcgatgtgtatggttgtagtttaacaggtctttttttttttttgtgaaataaaaggaattgtagtttaacaggtcttaagacatgtacagttttctttatggttgcatggttctgtttggaaggtaccactggtacccttttagtataataataaatttttcctttggctgataaaaaaaaggatgtgtaaattttagtataaattctcgctgacattaatatagtctttggcaattaaggagatgcgtttttccttaattaatctaatttttttatgagaaaaaaaagaaggaactcattgcatttgataaaatacatagggcattaggaattgagaaagatttcctttgtctggtccgcatcttcagtggattttacatgagacaaatttgatgatacattttcgatcatcttatactcacgaatcaatggcagcaggcagacagaagaaaagttgggaaatatagataattaattactatgcttattttctttgagcaaattatattgcctactctttctttgagttacttctatagcatactaccaaatgcaagtagcactggtagataacttttatcattcatatctcaacgatgtgcttatttagttatgttattgaaattaatttccatcggctcttttacttttccatggtatttgatatcatatctgaaacagaaattgtttgcaaagagggtcctaatttattcatcagtgaatgaattagatggtgttgcaaaatcgttttcttttttctttgtgaaaggcatttgagtaagactaaccaaagtagttcaaactaatgaagagttttttttcttcttctacttcttttatctgtgcttttaattttcaaactgtccaattcaaaaatggtgagaatatattaattgtatatatatgcattgagtgtagcacaattcacaacataagctaaattgtggagaaggatataaatttaatgcttacataatatattaaggaataatgaattttaagtgcgactaaatgttatatcaaatgattacatttattattgttaataaaaaaatattaattgtatatatgtacatgaaaagatatatatatatatataatgaatgataaatgcgcaattttatttgcgaagtcatattctcgttgaaggatgctaatagcttgtaatatctgcctgcatatgaagatatatattagcttgtaatgaagatgtaatcatttctatacctaatagagttttgggagcaaggatgaacagtatatccatttttttaaaccgccgtaattaaattatttttactttgtaatgaaacattctcaccaggtttggtccttttaataatttattcatatttaaattcttttttatgtacaaaaatttaaacttaataataacttatacaattacccgaacatatatatcatctaaaccactgtcttatctgagagtaaaacatacaaattattatagagcataattatcgtcttacccagtatatttcttctaactagaatatgtgttcacgttatctgtttcatcaacatggttgacgaaccatactactgcattgtagagggctttaattaatagattacacactgttattaaggatggaaataggccaggccgtctatcaggggtctttggcctggcctgtttaaggcctggcctgtttattataaaggctaggcttaggctttttgaaaagcctatttaaataaaaaggccgggctcaagctttaaaaaaagcctattaggcctatcaggctggcctatatatatatatatatatatatatatatatatatatatatatatatatagatagatagatagatattaaaattaaaaagatataaatcaatcttttaaaaaaagaaataaaataagataagataaaatctaaatagtctatcttacttaaaagataaaaaataaaatagaaaatttgaaatctttgtagtaggtttgtataaaagtcaatatatatatatatatatatatatattaaaactaaaaaatataaatcaatctttaaataaaaagaaataaaataagataagatacttaatctcatattagagtgctctaattaattttaatttttttcatgcacaaattaaaagggaagtatgtcaatatgtgtctttctttatattaattttaaaaaaatattatgcgaattctcaaagtttcactaatatataatatttattgtaaaataggctttttaataggctcgtaggccaagccaggcttttaaataggctagatcaggcctaaaaaaaaagcctatgacaggtaaataggctaggccagacttaatgtttttaaataaggtcaaggaatattggaatgcatgcatattttctttttttatacacacaagaataattaagagatgccttagcatctcatactgataaagaataactgtgtatattaagattaactgtgtataaaagacacaaccaaacaaccaacattattaatagattaaatatcacttttggttcttaatttatcttttttttattcaatttgattttcttcatcttttaaaatattcattttaatcttttatattttaaatttattcattctaacccttttttcaatgtagatttaacattgttaataattttaagatattgagtattaaaaatcgtcataaaacaaatttttcttcttctaaaatatctccataacctaataacacataatgattgcttttaattcacgcactctattttatttctattattgtgtattgaattatgctgtcttatagaacaattaacaacttatatatttttattttagtttatagtgattaaaaaaatatgttattaatttgtttgtaaaagttaatttactttgaataattttattttttaattatattttagaagagttagaacttgtttgggtatgttcttttagtaacacttataagataagaaaataagaagaaaaaaataaaataatttctctataagttaaaataaattttctattggataatcattaattaatttataaatgtcctttcatcttttagaaaaatatattaaaaaccttttataaattgactaataaaaatcttattttagctaataaaaaagtttatctcattaattttttatttcttttctttttcttaaaagtatttctaaaaaaacttattcaaataagcctttagtgatcaattcatttagactactcctcaaggattggattgaacttacaaaattttagctcaatattaatttgacctgccctagctaaaccatttttttttggcatgctccttgattgaccaatacaaatagatcggactatctcaaattgatagctctataaatttcatcaaatatgtcaaatgcacgactattttaagtgagtgaagatttcataagtgaaaaacgaattacttaagtgcatatgaagatatatattagatatagatctaataaacgactaatagatctaataaacgactaaggtttttatttcagatgtagtgtgaaatattggttctatcataaatgatatataaaactctcactcatgtttatatatactacgtatcaagagaaatatcacgtcaacttgagtctgttacgcagaagttataatttctaactttcggtcgacacacgtaaattttgattaaatgcggaaacacacagttaaaagaagaaacaaaaaaggagtttaaacacaggaaaagatttcaatatgcttcaattctagtgtgaaaatttgtagctcattgacgtaaaggttatgctcgggatttaggcccaacatctattacttgaaggtttgactaattaattggttcagaacttaggttagtctctttatgtatcataggtacgatttttttgatgaaatcatcacatgtacgattaatcagtcataagtttgattctaattatgtaatctgaagaaaaaaaataattattattattttaaataaattcgattaactattacacatgcacaccttataaactgcattcatatatttgaaaacaagggcttaaacgggccactaaaacttgaagataaccgtgttatgaaattagcattttctgtaattaacttcaacgtttattttttagtaatatcttttttttctccataaaagcttatattatttaaattttcttaattaattttaaacacaatagttagtttttttttgtacttcaatataatacaatagttagttaattacatcaacctaacatgtgtttatattatagtaaaaaataaattgtaatttttaattgttcctttaactagatcctgcttaaaaggagatctaattcaagcacattcaagtattaagtgtaattgtttttttaggttaatcgttcaagtttatatagaattgcatcagaactaatcaatcagataattttgcaagagtatagtgtgtgattctatctgttgttccgagatcctcgagtgattaaagttgcttaacaactaagcattgcaaaaagtagaatgctgaactcgtaatcaggaattccttggtcgatacatgagggcatggaacaaagggagctccaactgagcctaatgacgaaatccgactgaagggacttgagaagtgcactaataaataagaatctttaattgaaagattagtctcgtatcatgcaagtagacactcaaacaacaaaaacaaatacaatggtttaacttcatagatatatattttgttcctgatgatgagtctatatatgtacccaccataactccacaagggtcatgtgaggtcacaccgctgtgtcctaacacattgtaacaccaaattcaaaaggtttaatgaagataatttaaatattaaccaagtcatttaaatcaacaaggtactggaaagtcatgagaagaaagaaaaattgcaactgagaatacaagtctgattttcccattacccaaaatacaagatatatattgaagcctatgcaaatacgtcaacataaaacctggtcaaattctgcaataaaaaaataatgaatcatactaacactccatggaaatggaatttaatgatattacactaagtatttgtcttttttttaatcatgacttaattcatataatatcgtaaattaagaaacattgtattaacaaaaatacacaatattacgttgctatctaaatggaaagaaatatgtataaaatcaacaaaaagacctatgaaatataatattaataaacctagttcaaatacttaagatgtaaatatagtgcgcaatatttcacatatatttgataaattattttttagtctaaaattaattttaaattaaagtaattttagataaattttgtctctgatgaaaaattatataaaacttactattaacttattgttaaacattcaaacataaatgagtttacttaaaaaaataattttaattaaaattaatttaatttaaaatcaatttacatgcttattcaaatattatatgtgtgtttagatgagatttagtaaaattaattttaaaatgatataatttatatttgtatgtttttttattctaaatggacattagtagtaaaactttataaattttttcattcaatacaaaaattacttagtgtatatagataagtatcattaaaattgattttgaagttatatgttttatgtttggatgttatttttttttatcaattctaaaactcaaaattctttaatgtgaaaacataaaaatttatttaactaaaaatgatatttcaacattatagagaatctaatctgacaccatgccacacacttaaagttttctcaattcaatcaattccagatgcaaaattgattttttaacataaaacaaacatatgaatattacttaaaattttgttacctgatatttcaaggtgattctaaatcatttaacttgaatccaaacttaatttgtcttaaattcaaaaaatgcaagagttgggttgagtgagcaattgaaaactcaggtttcaagcatgagagaaagagaaacggggctgaagtggagggaaacaaatctagattagattctagcaggataaaatgccaaaactcaaaatccaagaagcaaccctgcagctatgcttcaaaaattcaagctttccaagtttttgcgtgcaaacttacgttcacgtccctctccttggaattgaatgaaaccccactcattaacaaagtcactttcaaaaagacactttcattgtcccccctcacctttttcccatacatgaagaaaaatgaacggttaatacattgagcatgaaagttgacaggtgaaatcccaaaccccttctcactataccctttttcttttattttccaaacattacacaaggagttactaccaaattattattttcagtactgagagttggagggtctattttctgtccataaatacctgtctcataggccaccccacttccatattttgcaacattttctcctcacatgttacataacaccaaagaactacaaatagttctcattgcataggtacaacctaattagctagctagatacacacccttgtttctttccattctgtctttgattgattattatcttcatatcaaggacaagcttaatagcttatagtttaatgacctttttattccaaagcttcttctttggttctcctaattaagttcatgcatccttaatggagtgatactccaaattaaataccaactttcggtgttttactttttttttttttttgctaattaaattttttaactagatagctctggttgcagccatagatggagtttcccaacgaagcaatatcagaagggtgttcacagaagaaaacgggaagagggaaaatagaaatcaagcggatcgagaacacaacgaataggcaagttaccttctgcaaacgccgtaacgggttgctcaagaaggcttatgaattgtctgttctgtgtgatgctgaggttgctcttgttgtcttctcaagccgtggacgcctctatgagtatgccaacaacaggttcaaatattcttttactactgattcaacacagtacttttcctctccttcaatctcatttcatatcttatgaaccatttaaataacacaaaccatatctagaaacaaaaagggttttatatatggggttaagaccttttttcttattatgattatttttgtttgttatgtggtatcatatataactgaaaggcatagttagtagataatcatatgtcgttaaaagtttaattttttaatttatatgtatgaaaaaatgtctattaaaagatgctaattatttaaacaagcattaatactttgaaaaattagtttttttaacttctgaccgatgaatactctaggttcaccatgtatatatcattctttctaactgttgtacttaattgttgctctatcacgcgtcttcccagtgatttttaagaagggtgcagatctgtgtaagcgatagaaattatagacgttaaggtgaaacaatatgaagtatgtagcagatgaagagaaagctttagttagggttacaaagatttgcaggtgagaaatcttagcttcctggtgtatctgctattgttaagctttaccaatccctctctcttgagtttctctctccacttgtcatccatcaaatcttaaaagggtctgggttgctgcacaaagctgtcatgcactcaatgagccccttccatcttgactcctccttaataccacttatttgtcaatgtatagtgacacaacacaagcatctcatccaattgggagttagggtttcagacttttcactatttagtatttagtcacacctcaatcacttcaattcgtttttacatatgtacacaaagttggaggaagaccatttcaattctaatgtgatagatcacggggaaatgcgcagaaactgcaaactaattaaataaccctttcagacttttattcacatagtaaacttgtatattttttttataacatcttttttatatatatctttttattgtataatatttttattacatacaaaaatttaatttgtactaatatagtttctctttttaagaatatttttatctccgtacaatgaggttacacgaagaagcaatcaaatcagatattagggctcttgattcaaaatgggtacagttttctttaaagttgcaacagaattttcacaggattaattgtttatgattaattaaggtcatttttagtctataatgcttcaatattttttaaaattcttactaaagtattcgttataaactctttttgagcataaagtaaatcaatttaaactaataagtatatcgagggttatggatgtcccaatttgtttcccattttcgtaaattttgtcctttacataatggaggaaagtctaatatggttagggcgtttcccagcccatagggtattatttggtgattttactttaaataacttgaatttcttttgggtacgtaaaacaaaaaacaaaaaacaaatgaattaagatgaaaaggcaaacgtgtaagaatttgattttgtgcataaaactagaaaattatgaagtgtagagaaacaacttttaggagaaataaatatttttagaagtgtagagaaacaatttttatgagaaactacaacctcattttctcatcctcatctcctatatttttaagaaaatatatcatagtgtttagatattattattcccgcttctgatttctttaccctaagtagctaaaagtaacatgatgatagcagattctaagaatggctaaaggcaaattaattctctttcccatatgtttttattgctttcatctttgtggaataaagcttcccattcctgacgtcaattctttacctattctctccattatatatgtgttttggacatttcaattaaagagaaagttaaacttacaccggcccactgatgcaacatcgacctcttcctgcatactcagtaaataaccactttgtatttgaactttagagaagttcagacagatggggtttaccattctttaagatcaaaagaatgaaacttcgtgtatttaaccatactcaatcaactagcttgttaatttttgtgttcttaatagaaaaaatttggatagggcctaacactgtaaggtaaacaaagaaattaaagcaagaggtcactgagctatttatatgaaagagaaatattaataacatttttttaatattaattataattatgggtaagattcaccagataagaagatgcacagaattttataatttataataattttcaatcaataacaaagaatgtgttagataatttgttcctagcatttctcttgcatgtaatagatgtaatgtaatttgtcaatttcatagattccaatggacattgaaattaaaaattataaggcttaaatatgtttttagttcctataaaattagcatgttatttggttcttataattttttttctttgctttccatccctttaaaatttaaaattattgatttttcccctttaaatatgaataaatcttaattttggtccctataaaacatatatttttttttattttaatctctagaaatcctttttaagatattacatgttaacattgtaccatatatatagacactagctgttgttacctgggacggtcacttgacattccgctgaacacataagctattaacgaatgtcacacaataatagagataaaaaataaaattttaaatttttgcaggatgaaaattaaaaataaaattataaggacaaaaatcaaaattactaattttatagaaattaaaaacatattttgctaaattataaatatacacccatttttattacaatctcaaagctttttggcctaagaatttaatgtcaaagaagatgagttcataattaatttgtaaactacagattaagtcgacaccgtgtacgtgttttggtaaaattagcatgtactttatcacatttttatgtttctatttgttgtattgttttgcagtgttagaggaactatcgataggtacaagaaagcatgtgctgcttccacaaatgcagaatctgtctctgaagctaatacacaggtaaatttagtaagctaaaaaaaaaaaatcaaagaaatgatagaaaatgctcttgtttggttaatttggtccagaataaatgttgttttaaaattacggcatatttttcttaatagaattacagcgtacgtgaaggttaattatttcaagctgcaatcttctcaaagccactaaaatcctttatcattaggatactctaatagtctaatgcttagttttgaatgtgacatttacgagttcaaatgttcaagggacatcttcaccaatatttgacagtttggtattgagaggtatgatgagtcccacacgagacaatgttaaaatggatcaaaccaattcaatccaatttaatctgcgctctcaactcataaaattaaaaatggattggacaaattttaagaatgggatgaaaatcacaatcgatccagcccaatcttagtgcattatgggttggattgaattagccataattgtttttaaatatataaatattatatatataatatttaactcagacttatccaataaataaaacaaataaatactttaaaaaaatctaaatatattgtcattatcataataatactatcttactaaatagtcttagtataaatgttgtttaaaatttatcatcatgaaaaaatataaagtaaagcaacaaaataaataatagttcaataaaatcaacacttattggtataattatgtttcttaactaaatgattcataatatttttagatatgaaataaattatattagaaagaaaaaaatatccacttaatttatatatattcataattcttgaaaaattaatatcatactaatatcattagaaaaaaaataataaaattatgtccaataaaattccaacaaaataattcacaaaagaatccaccttttgacccattgagttaacaagttatgtaaatttaacatttaattgcataatgcaactcaacctattttcatgagtttaggatgatttgtcgaaatttaacctattttttacaatatatacaggttgaaacagttagaaatcagttatctattagctcaacaagataacagttaaattagttagttgctccttcagttatatatatatatatatatatatatatatatatatatataattatgttacttttctctctcatgatatatcaataatacacattattttgttaatatctctcgtgttcatgttctctcttcacttgagctctatagactgtatcatgcatgtttctcaacacataattcaaatcatcacactgaaaaatgaattatttgttttatatataccttattctgcgttctagttaaattttaattctcctatcactaaattaattgctatatcataatgctcctccacaaggtttctctaactggttgacactatttatcaataccagttttatcagcaggaagcgtccaaattaaaaagacaaatcagagacattcagaatctaaacaggtcaatgttccattctcttaaaaatattattcatcagacttctccattgaaatgaaaaaattcaatgtgattttttgcattccaggcacatccttggtgaagctcttagctctctgagtctaaaggaattaaagaacctggaaagtagactggagaaaggtttaagcagagttagatccagaaaggtattatattatcagcacgaagcatcttaagcttctaaatatataggcattgtgaatttatgtagatatgcaagaagttagtcaaaaactagcaactaattaagataatttcagttagtattttgaaaattccaagttagaatgtctctattcctttggactaactacgcactccaattctttcagcatgaaactttgtttgccgatatcgagttcatgcaaaagcgggtactcatcatttccttcgatgctattagtttctgcttaatttatttgcttcatacatatatatatatatatatatatatatatgtatgtatgtatgtatatgcatatatatagtatctaaagaaaatatatcaaagttttacgatattgaaaccaaatgcatattttcaattaataggaccaagaatatgaaactgaaacgggataaacccagaagaaattccaatattcgtgaaaaataaagtaaaaatggcttgattgcttcgtacgaagggaattataaaaccttgcaaatttatgcctgatatttatattttttctaacatgaacattatacttgctgaaaaaatgcaggaaatagagctgcaaaaccataataattttctgagagctaaggtgatcatctcttaattccctccaagactctatatataaagtgtatgtcgagatgaatgataattaataatatatagttggtggatgatgcatgcatgtagatagctgaacacgagagatcacaacaacggcaacaggatatgataccgggaaatgtgtgcgagtcaaccataccttcacaatcatatgaccgcaatttcttccctgttaatctcatagattccaataatcaatattcacgtcaagaccaaactgctcttcaacttgtgtaagtacactcatcttccactgttaattacaagttgttgttattgaatgcccttttaataattattaattgatgaaaactaaaacaagctcgagggccaatgaccaatgaaacaaacaacttaattgctttcaacattgtaccaatcctttatatgcatgcaaccgtatatgcattacataagatttttaaatggctactaacaacatgggttttaatgtgggaaagtggttagtggacgttcaacttaaatggctcaggctgtgtttgtattgccctttagcagtttgaacgccaaagctttctctcagtaaaattgtggttcaacgtgcattggaacataagaaatagttcgacttacatatatatcattttacttgtttttaagtcatcaatgtaggatttgttattcagcatctccccaatccaaatggcatagccaagctataacttgttttcaatagtcaaccagggtaaatttcacatttgatcgagattcaaagatcatagctcctactcaagtctttttttgaaatcccttttcctttttttgtatatgaccttgttttcttttctgggcaggtgggtttttttaattttctttcttaatactgtttctctcttttggatttagtcttttcttgtatatgaaattttttaatagaaaaaagatgagtggacaccaatatggtaatatctatagttaaatataaagagaaaaagtttttttttaagcaatataaagagaaaaagttagagacaagtataaataataaataatatgacttggtagaaagagatgtattaaccttttatgccgtgttttttatatacaaatccataagttcatgattttgacagatgattccccatggcaaaaccattttgatatgtttctcacttccttaaattctcacctttggatgcagctgataagtgatttgaaattatgccacagcctttcaagtggtgtgggagcccttacatcgtcctatgtttcgtgaatgaaagtgcccttagaaattcctttgctaaagttcttacaacggagaacaagacaaaagctaatcagcacttgtaccaatacatcatatgatattgtttatgtatctttcaatatatatagtttctattcagtcctggcatattgtatttttatgttataaatgcttatttcaatatgaacactatacctatcgaggagtaaaagttaattgggcctccgcattattcatcatatataatttctccattatattccccccaattatataattctgaatatacgaaaagcctgaataattgcatttttttttcatatgccgtgatcactctccgctagttggggaaaaaatccttgttttgaagaagtcaggcttaaaacttcaaagttggacaacaaagaggaggattaagctagatcagtgggttgcttctgattctcaagcatatgaggaataacacaactattgtatttgattgtgttgcaagtcttacgttgagtaaaataaaaataaaaaatcaaagtgaataagttagaaatgtttgagtttattaagtttagacttttaggagaacatgatacctaaacttaaaacattaacgagcctaaccacattctattattaggcccgcaatccataataaattgttcggatagatttccttataaacacttctagaaatgaaaataagaaagtaaacttaaacgaacttcaattcaccctaggtgaaaattagtaagttcttttttttttaacttctttaaaaaattaattttaacttatatgtaacctttgtcaaaacattatatataagttaattttttaatttgtgtataatgtttatttcatttttacttattattttttctcttataattaccagaaaaattatccaaataggtacgtgttttaggtataagctcttcggctgcatgatttcaacataacttaagaatatacccattcacgtgagagaaaaaatcacatagtagacctgtccattccctccagcttacatacagaaattgcattaagtagtaatccctgttgtcctaaatctttaagcagttttacttccaaaatcctcggtttcttgcagtatatatagtgaccaaactcggcaacatttgttaccggggtctgttccttgttgtccaggttggagtcacagtgaaattgtaccaatcaattgtgcaggttcctttgcctcctttttgaaaggtttgtagcctcaaagtttatataagattaatgttatcatatatcaaattttgacaaaaaatttatacaagaaagagagatagaaaaacaataaatgttataagataaatggtactataatataaataaactgttagggacaaagtcccacatggtgagctttgcttttagcttgcactccaaagccataaaagaaggcttggtggaccctttgttcacatcccaaaatcatttctcttcttcctttatttatatagtctacttagagaagaaaaatatgaaaaaaaatagtttctccgttcttttagtagtagtattttcctctttggtagtgtcaatgtgcttttcttgtgttcggagagagaaatgttgtactttctttcacttaattagtaaaattcttttcactcattatgatgtcatactcttttctcatctcttattttaattgaattataattttgttacttgtcacccatcataaccaaaaaagtgaatgggtaaaaattattttaaaagtttggtgttgaagtgttttttctaggaagtcttatttcaaaaacataattataaagattcacacgtcaaattctgttagggccttttgactcaaaatctcctcccgcatttaacttttagtacaattactttatataattgatgttaaaagaattatttttatttagaaataaattttcaaaagttaatttagaaaatttagtcttaaaaaaatcatttataagataaaattgtaaatatatgtctaaaattatgtggtatatacatctaaaattaacttttattacctagaaagctaaaaaaaattactaattccaaaagcaattttattttttaagacggtcaccattaaaacattattactagatacatattacaaatataaaataaattaaatattgatcagtgtcttctacgggcatattaatttttgtttttattttatagttcctcttattaaatacgttggaatttatattgctattatttttatttaaatttcaattaaatataaaaaatatatagtgctagtgttcatgaaaataattggatccatttatatagatgcagttaaagtaaaggaaggattaattctcgttcatattaattattcaacaggtataattaatttaaagagaaatataattagggttgatttgagaataaaataactaaaacttaaattttgattgataaaacaaaatatacttttaatttttataaaagaaaaaaagtcacgcatatatatatataaaggctccaacattatagctctcacgtataaagtgaacaaaattctctcaaattttactttagccacacttgtaaattgttggggaccgaccctaattaagtatactaatgtaaaatactcttttataaaatcggttactattagaattaatccttcttaaaaacacctgctttctatatcaattgattttgcatctatatacctagaatcaatctagaaaattaaaaataatcatactgaaaagggttaataatatgtaaggagatttgttaacccttaatttaactgtaacattcaatgcaagtaaggatctaaaatccaaaattaacaagatacaaatgctgttcaagtgaaacaatatctccattttgaaaaacaaaataatttactagactactggattatgatgcttatatcttcatactcttaaactgtagagctactgctagcttcttctaacagggtacgtattgtatacttgcttcatctatttgctatatatttatatatggacatgcagggagcattaccgtaagtcagagactgaaggcaagacattctttcctcttatcccatacggtatcattctatctccatattggaggtggaataactttgtctcttcacactataatcctacatttgctaataaacttatcggagaaatttacatatctagtccataaaattcgaacctcaggtaagccaatttcaagccacggctttgctgggccgttgaaatgaacaatagcagcagcttccacactctctatgctattgctaatttcttctgatcgatggcgataacccaaatcagtgacgaaccatgatgaatctatggggtgcacttgacccgcaaaagcaatcaaggcaggtggaagcactccaggattccataatgtcaacccggactggacgttctatgtcaaatttcaaatcatacaagtatacatgcagttaattagtatgatcatcagaattcacaagacagaagaaaacagcaccctccatgataaagaattgaatatagtgggcaattaatatttctctctctcaattataagatgactaatgatagatgcacacctacataatgtatatacttactaggatcttaaatacaagcaatacaaattctttattttttttatttcaaatataaacaaattttaattatatgtgtcttatttaataagattatctctaaaatatctttcatatttttcatgtttaatattaagtttcaataaaaaataatttttaaaaatatttatttttaattaaaaataacataatttaatgagttaattaatttttttaataaataagaagtatgttttaatcaagaccgaaatatatatatatatatatatatatatatatatatataaagtgataacaatattaatttttttttatcagtcttgtcactgatataccacatgcatcacatatctacacatttttctcttatatctctatttctctttaggtgtctagcagtagcgcattagtgtccatggattatttaactaagacattataatacttgcttgatatttctcatagtccatacaaactaataaaagatttaatgaacatttcaaatcactcgtgttgatgttcattaagaatgatgagacaaccgaattaagaagtaaaaatgtgaagttaaaggattatcttgctagctagtaccattttgaagcatatggaaatttgtcaaaacacattttaaatagaaatgcagttgcctaataacttccttatgttcatcaaaatatacttacaagtttcaaccattgatgataggtcttagtaatatttgatctcctccaagcttcaagatcaaatatattcacgccaaagagccatgcacacttatcaccatcaaagttggatgatatgataggatgtgaaaaattcaaaaagctgacgtatttgtttccagggcagcaactgttctcacaccatgacttgaacactgaaccactgactttgccattaatatctagttcccacaaagaagatatgtcatgttgtactacaacatcatcatccagcaatactaccttgtttagatctggaaacagctgtgatggtccacaaaaaatcagattatgaaacaatcatgaattattactgagcattcgtcttgttaattattactaaaatcttattcaaggttttaaattacagtcctatagtttcgttgagttccttgatattacaggaaaagtggaataattatcaattttggggagtcttatttctaaatcatgaaagggagttattaaatgaaacgttaaactcaaaaaaaaaaaaaaatgtcaataaatttcaggcaattataaagaaaatattagaaaaatagtaacagagactattattagcattgctcccacaggaaattgcgaactaatgcagtcatgattgtaatcgcattgcagttgcaaacaccacaaaaaccttccaactttgaaattgtggttgcctactattttttaaaaccttgatcaatcttagggctagctaaagaataaagaaaaaactaacatgtattacctcagggatatagatgcgaagatgattcaacaaggaaaggctgctgggccttaaagcttgaaaatatctgttatgctcttcactatggtcaagctccttttctttatagttgttgtcgtagtgcttccaaattaactgatttgtttcctgcatctctctaacaccagcgttcacttctttagaccaatcatagtggtgtaaccctctaacttgtacaactgctgagttaatagagttgatggcaaaccaagtatgcattggagtataagttttcttgtcagtaacgacgtgaaaaactagtcttccagggttggctgaattttcaacagtggaggttacaaccacggaagctgcaaggacgttgtcggttaggagaacaatgtggtgaaaggtgggatcaactaggcgagagacatgttcaggagaaggtagacgagatcgtgccatggcatttacggcgtattcttcagccaacttcaaacaaagacaatgcagactttgaggaacaccgtgtgaagctatatgccaattaagtgactccttctttcttgctgattgcacctcacgttccatctgtgacagctacatatatatcaacataaaataaaatgacatgtcagacattatactatatcctaagagtaatcaacaagcaaaagattatattaacaacgtaaataatcagtaaatgttgtgtgtaccatggctttggtcttgaaagcaaatgccttgaggtcttgttttaacgcaaacactttcacaagctcgttaaatgacattgctcctccttcattagcattgccatcatttgcctctattagcactctggtcaactcatctctgagtttcttcatgcacatacatacagtatcaccgtaaaaaacgagaatgaaagtcacggaaacgtaaaaatatgagagaaaaaataaataattttctcatttatatttttcatatatatttctttttcctatatataaaatctagaataaattaaaattttactaaaaacttacaaagctataaataaaaccatttatgtgcttttaccaaagctttttcaatcagctttataagataatattggagtctccatataatatggttaagaatttaatcaatccttactgtcctcattattctaaataaaaactaaatttcagaacttgcaatttgaaataattggttcattgccatgtataaataaaagttcaactttagcgtaatttaaaatagttggttctctgacatgtcaaatggtaattaatctgtaagcttagaatatatagtcaaatatcatttttatcaaaatatctctgaatctttctaacccattttctgaaattttaaataaattattttaacatttgttgtgtccgtaagatattgattacggttttttttattaaataatagattatatgtttaatatgttattgtcacttatcatttgatagtcttttttctaaacttttattttgtcttcttatttttctttttgtcggatccccatatgaatatatgataaaaaaaaaagacaaaataaaaaattatggcttattatttttttctaaacttttattgtatcttattatttttcttttgtcggatccccatatgaacaatatatcgtccgtgctggcagctagtgttcgtatttaaattcattttcattttaaatttataaaattatggcatttaacttaacattattttttacaacacataataaaaaatacagttaaataaataataataagcttgtttattaaaaataatatatatatatatatatattagtgtacttatagttgcgtttattttataaaaataaatcatagaaatttaaaaattatttattccagcattatccagctcaccttaaaacgaattaatgatcatacagtttattaaaaaatgttatccaaaggattacttataagttgtttattcaaatacaaataaacaagtcaaaaataataatagattggttctaccagattgtcgtcacctccgccgaaaaatgtcgatcccacgcaatctgcaacaattacaatggttcatatatagatgctgccataaacttttcaacaaaagatgagctcattttaaggatgatttaagatttaaatttatctttgtataactttgagttaaacaagctaaatatgtaagtttaattttgatgtcctatcagtgtgaagatttttttataccatctactactaaaataataactttagtatgacaaaaaaaattataaaaagatcaaaataaattatttaaaacttaatgtatcaaaatagaattttcaaaaatataaaaattaaaatcaaatttttaattaaaacttaatatatcaaattaagaaaatagatcaaaaattgcatttaatttaataaagtaacatgaagagtgaaactttcattctatcaactcttttaattagacacctttaactgtattttttttctcttttatacggatatgcatttaacatattatcttatcaatgagataaaaaaaaaaaagtcattttcaatcatcttaaactagtgatttgattactgattaagatttaatattgattggtgattagtgatcttaagtgcacatagtattatgagtgcatttgataatattattatttccgctgataaaaaagtacattttatactattctcctattaaaactagacttttacttcactaacatatattaacctttaaacctttaattaaagtcaaattttattacatagattattaagataaagctttaattttattgaagaatcatgttaaaagcatttataaagctacacctgaatattatccttaataaataaaataacctattagtggtataggatttaggagttaattagggaaacattaaaattaaaggtatctttgtataatttataggtattcttcattgaaaataattttattcgacttaaataggattagtatatatccatgactcaaatttaaaataattgattaagttaatccatgtattccattaatagttaaaaaattaaaggtatcacaaaacttaaactagtttttttcaccttttataataataaaatcataatatttgtaaagataaaaagtgcttatttaaatatattatttcaaaatattttaattaattttaaattccactacacttttatcctttcgtttgttttataaatttcacgtttaaactatgcacagaatctgttttatctaattaaattgaaacaactgcatttctctatgaaaaaataaatatcaaaacaaaaagaatgttattgcatgtgtttatatataaaaaataattattaaaagttttaattgcagcaaatacttgttattaaaaaattcatttcaaaatgtttcttaaaaaataccagtattattaaagtaatcgttaagagaattttgaaaaatagtaaataaaaatttccttgagattattatgttggacctaaaagaagccaaatgaagctgaaaatagtaagtttcggtatttattattttcactatgattatatacactgaaattcattcatatgtacttgtcccacactcaactgttttccttaccgaactggctactacaaaaaagttaacagtaaaagaaaaaagaaaaaattacgaaccaaaagtaaaaaaatgaatcggaaaagaaaaattaccaaaggtggagcacaccgcagaagattccagcaccaaaaccgccactctcacaaagctgagcagcaacacgattccgagcaccaccaccatccggttggaaatccggcgagcggggacggtgtaggcaggagcagtggtcttggcggatccttttccggcgacgagtctcttaatccgctttgcagatacatagagcttcatcttctgaattccattccctataagctatatctggctagctttctctccgatcgaatcggcaccggatctgagtgacgaagagagtgtgtgtgttgcattcgtgtttggatcggtttctgcgattgaaatgagggttgagttttttagttacggggaaaagaaagaaagtagtagttgctgaagtgagggagataaagaaagagagtggaaatgcgaaaaccaaagtcgcgggaaatgattaatatagcaattacaccttggtgttgcgatctctcttttcgccactgtttttcacgttatttactcttttgacactctttcgccgacacctccatgacgtgacacccgcttcttcgagatgctgccggtacctatgaggctataaccagtatttttcaatttcattttttttattatttggtcattttattttttcaaaaaagaatatataaattgatagacataatcaacattttattcgtctgttgatatgattttatttttatttttcatttataataagtgaaaatattttaaaattaaaaaaatattaatactgcctccttctttatatattagacactttttttaaaatctatttgtttctttttattatatttttttgagttttcttttgtattaatctttttaattaaaatattcttaaattataataaatattataaattaataagataagttcatctattatcttataaaaattgaagaaaatgattagcacatataaattaattagatgaaaaataattaaaaataaaaataaaaaagtgaggcatatcttgataatttttaaaaaataataaaattttaataaatttaatattactaactaaattaattaaatttaaattcttaatatgtataaattaattaaaagtatcttatatttaaagacaaatggagtatattttaaattttgcaaagaaaagtttttgtttaaaaaataatagcgctaatgataaaaaaatatttgtatttacttaaattaaatttaataatttaaaatttgaatcttattaactaatatcttaaacatattggttaaataagtaataataataataataataataatagcagcatatcatgctaaaaataactcggatatactcctatattaattaacagtatttttaatagcagtaaaaaaatagcatttttagtaaaaacttatacttttaattttttattgatgttctaaaaaaattattaaaaacttttaataatttactatcttttggaaatctaacgtttttaatgactattaacaaagaagtactaccactgtaccactttcactcgttttttgtttttttaagaaattaatgttgaagtcggcgatcctgtctccaacctccacgtgttgttcaattttttacaatgcggatttgggctcttataattgtgtatccatttttaaaatattaatctatacttattgatcatattctaaaactatatattatggaatgatgtgtgcaacccaacgctagatgtactcagaaagcaatcacaagtaaaatatctagctagcctctaggtatatatttgggcttatttattttagagagaaaaataaacaatactattaattattaataaataagattaatagctaatattatgtacatatgcaataaattatgactgttttaaaatattgaaaaaaaaatcatgagatatgcataatttagagaagctagccaaatctatattcagaaaattatatatatatatatataatattcaaaatattaaatagcatattttaaactacttataaattattattattattattaaatttgccggtagtagttgattatcacaagttctacattttgcatgggttttatcaatgatctcctaattaataaattagatttggatggacatatgaaaaggaatctaccacttatatttaattgatgttaagtagtagtagtatttggtacggcatacggccccagtttttaaaacgttgtgtacagccacacatctgaatcaaggttttaaaaatcatagtgggagctgaggcgaaatggtataattaattataattaatattattatttttattttaatataatatattaaataatattaaacaaaaaatcacataatatttataacttcataatattaaaaaataaattaaatttataaaattcatgactcataatatataatattaaaaattaaatatgaaactaaatcaaatatatcataatatttaaatttaataacacataataatatttattagtagtaactacgcttaaaaaataaagataataaacataattatctttcatcataatattgttttagaattatatcaacaattataatatcaagtttttaatttaaaatataaaatataaatagtttttttgggcaaactgattcaaacttggatgattcgtccagttttggattagttcaattggttttttataccagtttttttgtaagactgatttctagagttaaatgaactggtttgattattaatttctggttcaaccagtgcatgccaattggttggtttggttcaattctaatactaatattaatctgaattattaataatttttgcgcgcgtgtgaaatcttaattacttgtagttcgatgccaactgagaaaacataatcctgtttcatcattaaccaaatttacataaacttcaacgactgtatgttagatcttagtctttttttttattttttttttattttttatttttacaacgactgtaggttagatcttagtttctacaccgagatttttccgccaaggaaaaaaaaatggttattattagtatgtgtttacctaaattttgaaaaatgtagagttctaaaaaaatatggcaagtggtagtgattgtatacctaaagaattagataggggtgcaaacaggtaaggatgacacgtaaagaaaaaatatataatgggaaaaaaaacttctagatgattttttttttaataaatactactatatataatttaaatcctctctttctaccaatttaccccgggatttagatcctctcgtaaaacgatatgattacgttggaaagtaaaagacataatagaaagaaaataccactataactagtaggtttaataatttatctgtctcttttgtcattctcctttttaataaaaagaaaagaaaagtagtaattatgtatatcgtgcaatgaacagctatatttgtaaaaatgtaaaagttaaattaaaaatattatataaaattaactcaattgataaataattattttaatgataacggatataaatatacaaatatttaaaaccttgaaacttttaaaatctcaaactattctaattaacaaaaaaatcatttatgatttacaaattaaaattctattataatttacattgatcaaagaaagttttcttcaatgaacgagaagcgtgaattaattacaggtgactattatcagaattcggttggatacaagtaattgtaagttgatgaggaaaatatcataaatctcaaaaagagttaaaaaaggaaatccataagtaattaacttattatagagcgaggaaactaagtagagagagagagagagagagagagagagagagctgcatgtgctctgatacaacaaacagcaagcactcatatgttaagtggagctaataggtctagcaatctataccatgcattgatgcatgttgatgcaatatctttgtcaagttgcttataatatcaatatatcatacgaatgagttttacaattggtacgtaggaaaattaaaaatcaaacacatgcattttaagtatctattagtttggtttcttttttttattcctttttctagagtcttattcattaattattttaattaaacatataattgaatgccttcataaatattcaattctccctttatttcttactcgtgtaccgcccttaaaaattgttataaagccctcgaacgtgatataagactaccaaaattctccctttaaaggactacgacatgattgtctgaccttaatatctcccttattaattcttgatgcagaattggagcaagcacatagatgagttgagtggtaaagaaaaaataaaaactaaaaaagtctcaagtttaattttccctgtaaaaaaaatcaataaattaacaattaatattttttgaaaaaaaatatgctatcttttatctttggtcaataattaaataataatgtatagacaatttttttatgaatatggaaaataagcacctcattaattattcttgaattgtatcacaccaagtccactatgataacgttatttatttacgggcacgttgattcaggataatatggacgtgaaatatggcactcacgctagctaccttgagtcattatacaatgaaatggataaggatgttgtggctgtacaatattcagtttttttttcttcaataatgaaaaatgttattgtggcaaaaaaaataaaattgcctcacattcctcacatcattaggatgataagtggatagaattatggatttgaacaaaattaataagttaaaaataattttaacttttaagtccgtcctttttcgtttgtgtgagagagatatgattttcattcaatgtatattatatctttatgtcttattcactattaacattaaattcagtccttaccactttaatctccagtccatatgaaacatatgctgtcttttttcacctatatatatatatatatatatatatatatatatatatatatctacgtacttcttgactgttgagctatcactatctatggcttcatgttatatatgttatgtcaccattttaatgactcattagacattttttttagcttgcagtgatagtgtgaaccttgtagatttatcatgtttatggactcttcgcctaattaaattctattttatgatatacatatttaataggattcgatataagctctgtttttatctctaaattaactttagacaacatttttacattctgtgtgtgtgtttttgtcaatttcgtctatattggcttctaaatataattgttaaggagaaagtaataatacttgaatctcacatgcatatatgtgtctattttgatcgcatgtgaatcacacattatttatattgaatttacaacaaaaaatttatttccatccttacaagtttggtcgacatttcactttagttactaaaaatgaataggcaaagaaaagttataattcccttgtgatcaagctaggtgggtgcaattctagctattcttgtaaattttcaggttgcttatgctttgaggttcagaagtattcaggaggtattgggtgatgagggataaacaacattggtgttggggtcattgcactagcgcgtccgcagaaacacagtagagaaggaccatcatgatccgcgaggaaatcatagctagcgaccatgtaaatcactgagttagagccgttgttgttggcctgctgttgcaattctgggttgtggcatgtactgctgagagaagatatatgcaaaacataacaagaaagagaaaatgcattggaaccaaagccattaaagacgagagagaaatcatactcttttttttatatttattttttaaatcagattaaatgttaaattacgataacattcttaaaataaataaattaaaatattaaattagtgatttttttggtcctacacagttttgtataaattgctaatacacatacactaagagaagatataagaatgtcaacaattttatatatatatatatatatatatatacccacgtatacatatgtatatgtgggtatcaaataagaacttttattattataagaagttaaaactctaaattcaaattgtataatcatacacggatattaaaaattaaaatttaattgtgcgtgacttttatatatatgatgactaatgaacttattatattgatcatctaggtatagttgtttgtcgtaggctaataatctaggcatagttgttggcctgctattgcaattctgagttgtcggatgtacttatgagagaagatgcaaagacaacatgcattggaacgaatgacattaaagacgagagagaaatcatactcttttttactttattttttttgaatcagattaaatggtaaattacggtatcatccttaaaataaataaattaaaatattaaattagtgattttttcatcctacacatctttttataaattgctaatacatacactaagagaggatataagaagatctttaatggtaaattctaaattgggatcttaaatcactttttgattgatcccataatgttacataggattaaagatgtatcaagatctctctcatttgtttctttagtgatagatctaattttgagatcttaagaagaggaagagaaaacaaattattcttttttgtagggaaaacaaattattattttttgaatattatacagatcttctacgagaactcattcttcatattaaaaatttgttcatatgctttattgaaaaatttagtgaaaatcaaattttgaactcaaaatccatactcaagatttggtactaaagatactctaattatgttatatatgtatgtcactccaaaaaagagttttattgccatcgttttgtttctttcaagagctaattgtaactctaacatctgaatcttgaaaatgaatttgctcaagtataataattaataagacaaaaaatatgtttttaccttattctgtttgtgtgaaagagtgactctaactgaagagtctattgaattttaatacaagagtgagcttaaaaacttgcatgtttccaaaatcaacgtatttatatgtcacaaaataatctaacaaattattaaagaaattactaaagagtaaagacgcataagcgtcatgaaatcctaaaattttaaaatccaattgacaaaataacttatttgaaatcctaaaattttaaaatgggtaacgagttaaacaaaaagtagaagaagaagaaaaatataacatgattaagcatattgaaaccaatatggaatctgctttacaaaggagacatatgaaaaggaggaatgtgatggagtgtacaaagtcaaaagctaaatttatggagcaaaggtgaaggtggctgaaggaaccaagcatgcacatgcacatggttgatgtttgttgtctttggtgcttctaaatgggcccacagttggcccagtaaatagttaagtgctccttgttctgttgttagcccaatatgagtcggaaaggtgcgggctgggacccaagatggaacttgcgtcacaaatcgtatcaacaagaataagaatgcttcttcattaggatcaaggttttttttttttttttttttttttttttttttataagtaaaacaactcaaagcatttcattggtaagaatagtcttaatacaagatgatatgtaataaaaaaaaactagtgactaacatgaaattgcgatgtctttcctagaagatgtacaatataatttgcttgtctcctaacaaaatactgaaaacagcaggatcaagcttgtaataaaaatatcagtgggaatttatattgtgagctcgtttatttaaatttattttgtaaaaagaatgtttttaatgaaataaacaattgtttttgtttttatatatttgtctaatttttttcttaatttaccccaaaaaaaataatgtcattgcatattagaattaaatccaaaggtctggcttgttgaatgtcatagaattagcaaatatagggtaaaaaactaatgatttctgccgaaagttaacttgcagcacagatactttaatgttttatgacttgagaatctttaaaagtgatgtttatatgatatgtttgtattcaaaaaaacattatatgtatttttattaattaaattaataaaaaatttccatgctactgtggacaggtcaaactcactatggatatacattcaagttacttgatgttccttgtgcataccttgctcaagaagataagattggtgagtaggagttgacgtacacattaaatcacaaaatgctactgtggacaggtcaaactcactatggacatacattcatgaaaccaaaatataattaatttatattggtagaataatagtattcactcttatttcaaaaaaaagatgaattaaagtcacatttaaattgaatatagcttaatttacagccatgatcttaggcagaaattctataaattcagggatttctgcttctaatagaccaggaacttaaactaaatatacatatttatttcactttttaatataaatttaacacatgttaatttatatgcaatagtttttgtatgcaaaatggaaataagtttgtcaaaagtatttatatatataaagaagcaaactacaccagtatcttgtgatattctttttcgaattacgcataacataattcttttttctattgttacaataatatccttagaaaacattatactaatacgcctattgtattacacaaattcccaataatatttgaaatcgttaaggtgggatattgtgtgtcattcggaaaaaaatcaggtgttaatgttaaaaaattatgaagaaggtaagggatgaacttagcaaaaaaaggggtgaaaacaacagttcccaaatgacagcaatccagcaaccgactaaagtgcaaaactgcaaatcgtttaccgcacagaacatttcagtgattcatccaatggattatccttgcacctagagattcaactcaacacttcagaggtagtgtcgattttggagattcaacactgtaggtaatctccttctgatttgaatgatgcatttgatttaacgctatcgacccttcatggtttaccaatcttctctcaagaaagtttttggtaaaattttgatcttttctaccctttctatcaacccttcttgcagcatgttgaagcgtggatacaaaccaaagccatggagtggagctcagaattgccgggtttctgtgttcctcatgtttttttcattgattctaatgttagtggttttccttttagtatttcgttatgacagtgatggtgctaatcccagtttagcttatgaacttcctaaacaaaaatggaatagctttgactctttggtgcatttgcatccaacaaaagagttccggaatggaactgatttgatatggcaagtgcctgaatcacctaaaggtgttctctttctggctcatggatgcaatggcagggcaatcaacttctgggacaagtcccctgaatgccctgattgcattggtttgcctgaggaacggttgcttgtactccatggtcttgcccaaggttttgctgttattactatttcaagtgcacaaagatgttggacatttggtaaagaagtgttggttgttaaagacattatagagtggtggattgatagaaggaagcttgagaaacttcctcttgtggctttgggtgcttcttctggagggtattttgtgtctgtgcttgccaccgccgtaaagtttagtagtactgtgctcatgattgctgaggggatgtttgagcaaattgatgttaaaggggactacccgccgaccctttttgttcacatgcccaaagatctttataggcagcagaaaatagatgagtatgtggaggttttaaaagataaagggattgatgttggtgttgttgaatgtatggagtttccattgtcaccaagtactttagctgatagaattccagggcttgatcaggctctttccagaaatttatttgagttctttcaggaaaagggctttattgataaaaatggttatatgaggaaagatgggcgtcaaatcaaatggaaaaaggctcttgaggagaagaaagctcttatgctggataagaatctggtccctcacatccaagaggagctaaaccttgcatttgcttaccatgagatgactagtgtgcattctgaccaaatttttaaatggtttgaatctcacatgagctcatcaaaacttacctgcattgaaaccacttgtatatgatggacctaaccttcgagtcaattttcctgaaattcaatctgagatccattgactcatgtaaaaactgctatagcggtttctttatcagagattgagtctcaagggctggaatttcttaattgggtgttactgtcagaagttatctatgtaaaaggtatgcctctgaacctttgcaccaataccatatgtgctttggcaagcagtatgctgaatgttatcctagattttgttaaaattgtaatctttctactgtttttttgagatttgaagcacaaatcattgtttaatctttgaaatttgaataccctggtggacttgagtttcaaaatacactttttaatatggctatcaaattatgagcctgaccctgcaagtttgactactagacttattttccctatgatctaaacccaatttgacatctatacttgaataaaatttaaaataagaaatgcaaacataatttttaaataagaactgaaatgaataaaattgaagcgagttttagatgagggcttctaatttcaaggtgaagaataatgacagtattttaattaaatgcatacaattttccttggtttttaccctttgcttgtattgatggtgagaggtggaaaggagaaaaattatatgagatagtaaaagatgccattctttggatgtttagaaaggaaaaggaatggaatcaaggagactcctttccactccacacctctctattcccttcaaattgacaggggagtggatggaataacttttgaaattatcttttttgccattcatcctaagatttaatgtgtttgatatgagggcaccatgggaacaatgaacttgtaattcttttaattccactcacttctactgtaattatgaatgggaagtgggaactttcttccttcctatcagtaaacatctttactatagtattttgagagctttcttcctttctaccaataaacatctaaattcttgtaattatatggtgctgtttttgtccctgcaagtggaggttctaagcacaagaatgctcctgaaaatggaagtgatgtggggtgaaaacattgtatattgtatattgtattttatgtgagatcttactatccttgttaggatcttacaatatacatgttcccctcctttccaatcctaggtgggatctcaatttgactaccttggacatatggatgacttcatattcctcttgtttgtcatcttaagcattcaaaagcttttggagcttaaaagttatatacacattggaattcttaaaattaaaagttttgggttcattcggataaactaaaataaatgcttttacatataattttcttatagttttttttatctagaatatattaatttttacttgtgaaaaagaaaagcacaacccaactttttctctgaggcttttgcttttttttttttttctccaaaaaacttatctaattaacataattttttcaaacatattttgaattaaaaaaaatactttctttttaaatcacaaagaatttgatccatgttcttcgttttattccttaccattaacacaagtaaatatatcatatatagcaaagcaatataactttctagctacgaagtgcactagagtagtagaggtctttaatatctcagttattatgttgctcaaaagtatttggtaagttgaagacgcgttttgggttttatttgtgtttgtgttttaaagatataatgaatctttttacgttacactgggaagactaaactagtagaggtctttaatatctcagttattatcttgctcaaaagtatttggtaagttgaagacgtgttttgggttttatttgtgtttgtgttttaaagatataatgaatctttttacattacactgggaagactaccctccttttatagtctttacctgccggtgtaattgttctggaccataccacagccttgtacacttccccttgaggcactttaaaagacattaattggagctcacatggcgctttaatccttcctctgccactgtaacccatcattcccaattcacataggggcaccattgccagcatcttggtccatctattgtctttgtttgcatatatattggcaacaaaaccgttcccttgaatttcactaggaaacaattctagacaacttcattctttacagtttgtaccttgttcacgttttcaagactcaccatatcattcttatctcttgaatgccatcatgttgcatgaacaatcgacatttctagactagggctatttctaaattacactttatgggtaatcaatttcttttgatagattatgtacatccttataggtggaccttcattaatgagaagatgatgcacccttttagtgctgtacttataacaatcctcagtttttatttgatgaattatatcacagattctgattttgccttccattttagctgagttgaagtgatttttatataatgaaataagtttatcttaataagaattttgcattttttcatatataatgaaaagaagtttgtactttcgaatgcagatataattgaactattgaagtaacaatatataaactttattacagaataagaaacgataaaggctaacatgaacttgtaaagtaaaacgatatccatattacacaagataaaagcctaaataacacacttagaataagtcttagacataatattcttaactaaataaactgacacaaagaccaaattaactatatcatgctcgaggcttcattcgcccctcattagccatcttgaagaggttggcttgtgctgctgctaccttatttgaggcaagagatgctataaatctgtctctgacttgctgggttgtataagggaacctgttgttcaccaaggaattaagaaaggaagctgtcccttctctgtagagtgctcctagcccatcagttctagtgttggaaagtgcttgtggcaagctgagactggcaccaaatcctggcatactagagacaccaaatgtatggcctaaggttccccaccagcctagcaatccccaaatgattcctgggtgagtgttccagtagctgcaatttagaggacaaggtcccataggttacttaacagtgtggctgtatatcatatcatagtttatagtgcaatgtagtgaaaagaagtagtaacttacttgcatgtaccagtgaagggagttggggaaggaaggtaagggggtgtggaggggatagtgggggtgccggggtcaactggggttgaaggtgggctcacagtgattggtgttggggggctaccacctccataagttggtggtgagttatagtacccacctcctcctgagggagggtttgatggtgttgatggggttgatggtgttgttgggactgagggtgttggagtagaggggtcatgtggtggtgtgccacagttgctgcctgagggtggtgatggggttggattgtaatttccaccatccgtgggtggtgatggggttggattgtaacttccaccatctgtgggtggtgatggggttggatcatagcttccaccacctgggggagttgatggagttggattgtaacttccaccaccacctgaaggtggtgatggagttggatcatagcttccaccaactggaggagttgatggagttggattgtaacttccgccaccatctgagggtggtgatggagttggatcatagcttccaccacctggaggagttgatggggttggattgtaacttccaccaccacttgagggtggtgatggagttggatcatagcttccaccacctgggggagttgacggggttgggttgtaacttccaccaccacttgagggtggtgatggagttggatcatagcttccaccacctgggggagttgatggggttggattgtaacttccaccacctccatgtgatggagatccatgatgagagggtgttccatgatgagagtggtgtggtgagcttccgtgcccaccactcccagagccatgatctggagagcagtatgaaccttcaagaagtaaaagcaacgtatactattagattttaaagttaaatgtcaagatagtttctttaagagctcttgatcgttcatacgtcaaatttgaaagtaaatggcctactgtagctagcaaggaaatgatatcttctattttgcataaataatgaagcaaaatgtatagttgagtaagagaattacatagagaatttgataaatctgttcctgcatgtgggtctggagagttgtagttcttctggtccacaatgatggcagtggtagatactacagggatgacaaggttctgagaaagcactccaagtagcaatgtgaacatagagaaagaaataggactgtgtcttttcctctccattgtcactgactgcttagaacactatgagaaagaagagaaaggggggtttgagtttggagaggggagtggactgggaagaatatataaaatggttcacagagtggagtaaatattagcaggtggaggagtatgcgggttagttgatgttttgcaggagcatttactccgtatttactactacttcatgcaataatgcctgagttttctaaaatagctttaaaacacacaacgcactctcctaactctggcctttggttcttgttgatcataagcttgagctggattgtactgaaattactcattagctttgagtgttgcatttgtcttattatggtattaattacaggcgtaaaccagtttatattctgtaagcttagtgagttatacatttatttaaccttcaataaatcaaatcaaatcaaatactacttgacagagaaatctccagcacccgatgcatttattggggctaatggagacgtgccccaggaataatttttcaatattatgccccatgaaagatttctaagtatttattataatgataccctcaaaatttgccggggttgatctacgtaatatatagtcatttgtataatatctatgtatgtatactcaaaatttgccggatttgtgtacatatttgacggaaagtattggcggtgatcactattttgtaccaagtctagcacataaattgcaataaatatatgatatttatctgaaaattcttttttttattattttaaatactactcacatttttatttgactttataaataacaattagcattttttttgtacaattatcattctattcaatttaaatatattttagtatgcaaattcaatatttatgtaataatcattttgcatgaaaaaaatatattgaactaaggcagttgaaaaaaaaaaagagagagagaaaagggaccctaatgtcgaagattacaagtgtgagtcattccgaactaaatgacaatggcagagggtaggtgagtttactaaaaaaatgttgggagagtagtggatacgagtggtgtttccccccatttttttgccggtaagattacaagctgtcctcacattttgatattactcgagcatcgattttgaatttgtatattacaaatttgtttacatatactctgtttactaaattttttagaagtatttatagcaactcctttcatggaattataacagattgtttagcaatagagttgccatgaattagcatctttagcttttgatttgcatgagaaatactggatagatgaaattcccttccaagtggaacattttgtgtctacaaaggctaaggctgggtgtgtttggatttccggtgggagcgttaaaagtatgtttaagaggaaaatgagtttacaattatgtttaattaatctccaaaaatatatttgagactaaaattttgtcttgaaactcagttgtaaaaaaataatatttgagatacttttgtaaacttaagtttaattcgaggcaactagggcaccttttttgtaagagacgctcagctcaagtcaacttctatcaattcaggcggaatttttcaaattttaatctaaacatacacaaatcattcagtttctactaccgaataacatctagtttttcagcctcaaaagagaaacataaaataaaaaataaagatgtataaattaattttaatttatagagaagtttaattaatacattttactttttttttctataaatgtttatagaaaaatttatctaaacatatccttaaatatttgttgatataaaaacataaatgtgtgtgcagactgtagtgtataggactggaggaaaacaagttggctgtgagcctgtgagctgtcgcctatggactaaatagaaaagacaaagctgttgtctatttgtttgtaaggaagtaaattgctattgttaggaactggaaagtctctcatcaatggagttgtgaacttttcatggattgtgactgttttgggactggtgcttcgggagggacatttctgagttcatcgttaaagcttggatttgtatattgttcttcatcaataggacataaataaggatttggatttttctcttttcatgtttcttagggtttactatcacgttgtcctactactttatgacatttatatttaaaattgattttatatgtaaagttaaaaaaaactaaaaaattgccaattacatgataaaaaaatttcggccataaacagaggagcgtacactaactggcccttgagctatgcattgggtgaaccagttgaggacaacgttttctcgggatctaatattgatagttttatatcgtgttagatttgttaatttagttaccacttaccaaatacttatctggacaaatcacatatacttctctaattttattttttatcaaaaaaatttaaaatcaatagacacttaatattgtgtacccatatcctatgttttagattttaatgtgtccgtgttatatctatctccatgtccgagttagtgtttcatatgtttcaacaccttttcatttgctggagtttcaatttagattttgtgtgcctactgccttggtaaacatacattttggactttggaaggagcaccttctctgtttgaagtaaataaatattcatgacacataaacttttctatatgaatttcaggagagaatgcttttcatttgtatggtgatatttttttttcttaacactttgatttaccagggagaaagtaagaatcttgactaattaagttcgattggaaggtaaataaaatttgattaataattatttttatcaatgatcgagtttggatattacccaaatgatttaatcttaatttcaacatattaatcacttatgtagaatcattgattatggttatataaaatatgttcatatatctgtattttagaaaattattcatctccaattcatttttatataggtagcaatgctagtattcattattcttatactttatgtataggtagacactcgttttcaaattcattatctacattttaattaattaatagtactattttatatgataattaagaaacataacaagcaaaatatttaactaaatttaaatccaacatactagtggattcaagtccaaaaaaatgtagaagaaaggtgttttctgttttttgcataaatttatcagaaataactcattttacattggtgaaggaccgcacccttctaaacaattaataattcctgaaatattggttacaggtgttgggcaaatctcggggggaagtgaagctggaagatgactaataaataacaagcccataggtatccattatgttaattattaacggaataatcattattaaattatgtttatgataataaatttacatgtgcacaaaaaaagtaatgttatttttatactgtaacattgtatttagaatatttttataatattatttgacctggactgttactcgacccttggtctatttgattagagtagacatgttgacccaaaaactatagaagtacaattcatcactactcaacaatgtttaattttcctcaccacttcctaatgttgcgtacacaagagtcaagagctcatacgaacgtgaaatgctgagacatatgacataaaactgttagcaatgaacaaccccaaattgtgggattaagcgttcgtcacattatcttgcatgagaattatcgtcctagcttgaagagagccatataagtgtaagcccaaaatatgcacactcaaattctaatttacttcaccatctatgacatacattgtcttggatagtagtagtactctggtggagtcttacaagtaattaccctagagtttaattcgtaaaagaccattgaagaattcaaattataccttgaatatttcacctaaggattggaagtaaacactattttctctatcttttttcttcacattaactacctcatcacatttttttcttttcgtatttttttttattgttcaaaagataatgctttcgatcgtctaatctgcataagttttgataattaagtcttggctgtattgaatgcaaccgtctaacgtctctgagtctatcacatgctaacaattatgtctataggaagctttccctcctgacataaaagttgttgcttccttcgaagtcctcagtctcaatagttggcaatatgtttcggtggtaaccatatggctgtgatagaatcgacgagcttattataccagattggaaggaccatagcgttgttaataagtttcttttatttacttaccaaaatagacgagttgttaaagagtgaaatttggtttatgaatgcagttgctatggagccagtataggcaaggttccacgacaaaagccaggtttacttctattttaactacagcaaaattatactaatgtttagtgaaatcatatggaataataatagaggtaattctctcaaaaaagtcgtggttgatcattgttagagtagaaataagttaggatgaacaaggttttttttttttttgcttaacatggtattgaaacgaaatacctaccataaaaaatagtgactaatttttgttagagactaagcatatacctaagatagatattctctttccagcatggagcatttatatctaatattggagtttgatccctaaataatttgattaagtaacataagctattatcatttgtgtcaattattgatggtagatagatttgatctgtttaaaagatccaaagcctaagcctggtatattatttattataggtttatttttttgccctttgaaagcctgatttatctcattaatctgtttaaaggcatgttgaatgcttagtcaattggccatgtgtggcctgagtctcggctgaagaatacacaatctctcaagcgctaaatctaaaaggcatagacaaatgttaattttggttaaacaatttacaatccctcgtatgctaaacatgaaagacaggcaatttattaatctcagttagacaatccataacctcttaaacacctaatcaaaaggtgtaaccaatttgttaatcttggcccgatgattgctatagtaataatctaacaacgagtcaaaatttggtgacattgagcaaatacaaatcttgttatttttgtaatcataatatttcttgtaaaaaagcaactgtatacaattcattcacagcttgtttatagagttcctttaacatatgaaatgatgaaccttctatgctaaacatcccccaacaagcaataaattcacaaaatccagctttctaacatgcatggaaatgatgctgatttaatttatcgccatgctccgaaaactttgtttggaatgttcaacgactgtgcttaggctgttacaaacaacattatctccaacattatcagcctacctttctaattactttaagaagatattttaaagttgagattcagagacggtgattctgcaccatcagacaccaatcagtatttacattgctgcaataatgagcaatcatgatgactgaaacatgatccaaagtcacatgataaaacaacgagacttcacctgcagatttttagggattcttgggtaactaaaaagcttctagcgttgaccatgaagagaaaaattatttttattttccatcatgaatttctcaggtatattaatgatgattacgtgtcattcttttcggacaatgaatctattacagaaaagaatcctgcagtattcttttcacaagctgtggtgctacagtattattttttcttcttttttttgtttctgtcacaaattagaaatttattaggaaggaattgacttctaggatgatcaagattataataatcgtaaaattcatttgggtttgacttcattcatcttcttccacaaaccacaggttcctataaaaatgtgctgaaccaacacttgaatcttaaaacaatttatagatatgaacttaaatttttccaagtccttgatccttacaagttcaccaatatttggggatattatctattttattttgtggggtttgtttcccctactacttttgctagtctctttcaatttcttgagacacaagcaatgctacaaagacaaaagaaagctcccccccaggggaaatggggtttccattgataggggagaccatggaattcttcaatgctcaaaggagaaaccaattgtttgaagagtttgttcatcctcgcattctgaagcatgagaagattttcagaacaaggagcatggggtctccaaatgtggttgtgaatggagctgaggccaataaattcttgttgtctaatgagttcaagttggggaaaatctcttggccttcttcctcagttaagctcatgggaagggactctatcatgcagatagatggggcaccgattcctccgtggtgttattggcacaagccttggttatgctggacttgagctagtagttccaaaactgtgcaattttgttcagtttcacttagctacaaactggaagggccaagaaaagattagtctttaccgttcaacaaaagtcctcagttagtgtttgagtggttattaggaatcaaagtggagccaggtatgctagatacctttgaaagagtgttggagggagtgttttctccagcagtcatgtttccaggttctaaattttggagagcaaagaaggccagggtggagatagaaaagatgttggtcaaagtggtgagagagaagagaagggaaatggaaggaagcatgggaagagaacaagatggaatgctgctgtccaaattggtatatgggatgatccaaggggagatcagtgaaaaagaggtcatagacaatgtggtgctactagtttttgcagctcaagatactactttttctgttgctatgacattcaagatgttggctaagcatcctgatttctttggataacttcatcaaggtaatctaattctatcatcatacttaaattagattttaatttctatgcattatgtcaaaaaattacattattaatcaatcaaaaatcataatagatacgacttttaagataattatgataaaagtaaaaaaaaaaaaaaaaaaaaaaaaaaaaaaaaaaaaagcttaccatatatatcaaattataattaattaatattcttaaaacttttcataatgtaagtgtatagactatttcctctttaaattatccaaaagtatttagagttgatagttgatagtttgaagttcttattttatgcagaacatgttgctataatgagcaacaaaagatgggttgagaatctcacaatggaggacataaagaagatgaagtatacctggcaagttgctagagaaagcatgagattgttccctccaatctttggttctttcaggaaggctattactgatattgaatatgaaggattcattatacctagaggatggaaggtgaatactactttcttgtttccttcttaaatccatgcatgcatatctcataatttgtcaattttgaattaaatcatgtaacatggggtttcttgtggctcttctcaggtgctatggacaacatacgggacacattacaatgaagagtattttaaggatcctatgagtttcaacccaagtaggtttgaggagggatcggaataccccaatatgcatttgttccctttggaggagggccaagagtgtgtgcagggtacctactagctaagttaaatatcctcatatttgtgcactatgttgtgacccaatatgagtggttcttactccacccagatgagccagtcgcaatggatcctttgcctttcccttcccttggaatgcccattagaatttctcccaagtatacatgatcatacaacctcaaaatgaatttgttttacatataaaaatattgtactcttggaacacacattaccaataagacaataattaatattattttgtttcctatcgtatgctgtccttgaattgaggcgtttgcacatgttatttacttgggtatggatccagttttcgactagatttcgaaggaaattcagaacatattataaaagatgcacatgaacagcatctttggaatatactagttaaaaagaatgtttgggaaacaaatccattgaagatcacaactccagaaaagatattggtgttacgtacatttcagcatttccaaagtaaatggctgacatgaaataattgcgaaaagtagtaactgatgaaagacgtgatttgctgtgcttcttttaatttatcaaattcttaatcttttagaaccgtctgatgtttaattaaacaaggatgaagatggaaattaatgaagtgggcacgttcattcattagtcattactatatgatatgtactacgttatacgttacaagctaggacactatttataatagacaaactcgcatggtctttcacacatagtatgaatgcataccaaacatgaacatatatagtggtgtatttcaaaagataacgcgtttacaatttagaaatgaagtctctagcttcctcacctgtcaccatcatcaagtattaaatatcaaaacaccactgagaagagaaaacggatgcactggaggtcaaagtatgatagaacaaacatatcaggcatatcatttgtgatcacctaatcactgagaaccaaatgcaaaaaagcttaaaattaaacctttttaacaaattgtttggtttaagaaaatacttttatatttttattttacatataaaaatattatattattttttacgtaaactgttcgaacttcctttctattttacattttttagacattttttctatgcaattaaaacctacacaaattctctccatcttttttttggggaatggaaggggagacccctaagaacaatccattaaaaatcacaagaaaacgtggtagaggatacatctgtcaaaactacagttgataaaaatagagggaataatttcacaaattcatagctgtttatctaaggacaaaccaagcttagctaaacaatcagccacttgatttccttctcttaaggcatgatgtcacgaaatgctacctccaattaagctctaggaacttcagtatctcgtgatcgacttaagcatggatggtaagtattaagtaggacatccagtagtgagcaatataatggctacttgcgagtctgatctacttgaaactgttgaaaaccatgactccaaacaatctgcacactaatttagttggtccacaattcatctatgacaacagaacaaaatcctatatcagcagagaaggagaaaataacatgacccaaggaatatgatacacataaatttaaaacctttatttttaaataacaagaaaacccttcttacatattttgactaattacataaaatcttctatctataaggtagcactatttgaaaatattaaaagtaaacattattaaatttttaattgaatttttttatattagaataacataaataatgaaaaaataaaaataaaaatataaaatatatatattttataatgggagaaattttatataaattaaaagtataaataatttatgtaaaaaaaaagtttaaagaattgaccctatttttatttagcttcctatctttagataaaaaataaaatgtgcttgtactcatttatttggaaagtttaagattctgatataaatgttgttaacacagcttgatgataacacacttattggtgagtcgtcaatccgattaataactcaagaaattcaaatgagctctattatgcatgatctcatatgatcaaatacgagccatgcctatttattgtgtgtattttgtcttgactcttgaccattatattgggtccaaggattagatgtccatccatcttcaattggacaattgagaatcactcaaacgtcttaaaagcacaaatgcttattaagctgtatgattcacgatcgaacacttcacaatcccttgaagttaagctgtatgattcacgatcgaacacatacatttgatgatccacaacatggtcaaggtcgagattgaaaacatataactcactattaagaagtcttgaatccggttaacacttcaaaaaatccaaataaacttaactacacgtgaacaaaggaattataactattttatagagtatgcctgaaagaattattatattgttcttattctaccttacttatgaaaaagactttgatggaagaaacataatttatttcaataatctttatgtctcgtgaattaatctcatgacttaccattttggaatataacccttcaaacatcaattttagaagaaacgtactttttgtttgctggatgagatccacggtctaatactacccagatgtaaatatatggatcggaaatgtaccgatattactacttgtgtgggtctggggaggaagacttagctacacgagttttctgatacagttttgactatatgcattgcacggcactgatatgtggcagagtgctctgttgtgaacgtgaagaagttaagatggtctgtctgaattgccacccactgggggcacctagctcaccaccaccatcactatttgacagctagcactgcacaataactacttgatcgtgatatatatttgcaccctcaattatttacattctattactccaatttctagaattttgttcaacttctataccaagagagagcctttggtgtgagtgtgtgtgaccatcttgctgcacatgcaggaactcttatgcagagtttttttttctataaagtagaaaaagtaatacagataaaatacaaaataaaataaaaaaaatagcgtacaaaattgattttcctaccttcaagtcatcgagccaaggggcgctaaatttagcacacactcagccgccagcaccacgtactaacgtagttttgtttgcgtgtaccatactctgatactcagtacttttccgcaattttcatactatttgggcaaaaattaataaataatataaattaattatttatttagcaaaaaggagtaaatgggtcaatatttagcaaattggggcactcaatcacgcccatttggggcatgtttaaacacgcccaaatggggcgtgtttgtgcacatggtgacacgtggcagcaaaaaaagggggtgtggggttttcgcggtgttttcgtaaattacggaagatcataacttttgactgggacgtccgattgacgcaaaaccggtggccacgcgctcgaaatcgagaggagaagccgctggcaagtccccgaaccaaaaaattttcccaaaagaggtctctaagtgcctcaaatttgtgatttaatcttcggagccctaaaaaaatttttgtttcctgatattttgtccattcaatcagtaaattgcaagctattctttatttatctaattacttctcttaatttcgagcgttttgacataaaatacgtctccatcggacattgttacgacaaaataacgactgttcaaagttatatgcaatgtcaattctacactatatgaatgttgaaccatttatgcatttgtttagggatgtgggttaattaactgttggatttggtttagggtttagggttttagggtttagggctttgggttaatgattaattgttgatgtttgttaagttgatggggcgtacatagtaggggattaaagggttactctgacgactatgagcatgagctgatgaagaacatgaatgggagaaagacatgatcacacgttttatttcttgttctgttttgctttttatctgtgtatatgatgatggacttggcacaagttgaaacaatgtatgtcaaggttcttactgtacatttttaaatgattttggtttaatgcataaatggaacaaacatatagtgtagaattgacattgcatataactttgaacagtcgttatttttcgtaacaatgtccgatggagacgtattttatgtcaaaacgctcgaaattaagagaagtaattagataaataaagaatagcttgcaattcaccgattgaatggacaaaatatcagaaaacaaaaaaatttttagggctccgaagattaaatcgcaaatttgaggcacttagagacctcttttgggaaaaattttttgggacttgccagcagcttctcctctcaatttcgagtgcgtgaccaccggtttcgcgtcaatcggacgttccagtcaaaagttatggtcttccgtaatttacgaaaacaccgcgaaaaccccacaccccctttttttgctgccacgtgtcaccatgtgcacaaacacgccccatttgggcgtgtttaaacacgccccaaatgggcgtgattgagtgccccagtttgctacatattggcccatttacccctttttgctaaataaataattaatttatgttatttattaatttttgcctactatttgactagtattatttatttctttaaatcattttcctagtgtttaattaattaatttttttatcatcaaatatatggattaactgatttaaaaaaaatcagtttaatcatagatcttaagttcagatcttaaatatgtaattgtattaaatactattttttaaatcatttttctaatatttaattaactaattcttttcatcattaaacatgtggatcaacttatctaaaaaaatttagtttaatcataaatcttaagttcagatcttgaatatgtaattgtgttaaataattaaaaaaagaatttttctgtctataataattttatttgactcgaacataataattctacttgttcaaacataattgtctttcctggaagatgtatttaactgggaataaaataaaaaagtctttttataatgatattttttaagatttaaacttttaatattacaacttattgtttaattttaatctattccgttgcatgtttcgaagggtgtaatgtgggtccagtccatactacattttttattattaacttcttttgggcttttgatttgtgtaattttgtaaagacgcaaccatgtaaagcccaaaaataaaaattgccatcaaaaccaacttcctccaattttttgccattgaaaattatttggcattaacttcctacaccagtaggatttctaatacacccagcatttttattaaatcccgataatacccctggttgctttttaacatacaccagcagtgtccatgctttttcttcatgctttttcttcactcttcttcgttggctgttggttgtggcttcgtcggcattttggaagtggtggttagctttggtgtagtttccgttggccgctggagtcgtcggagggtcgtcggaggtacgttctggtttgaatcgcaacccgtaatgataatacggattggcaatccgtatggtccatacggattgccaatccgtaaggtatttttttaaattttttatttttaatttgttaaaagtattattaatttaatgtatttgtcctattttcatttaaaaatatattgtgaagttaatattttttgtaggatatttttttgagcatggttgttatgcatttagttttttaatgatggttattttttaatttgtttgttaaggtggataatgataattggatgcatgatgatatgatgtctaaagaaatgaatatgagtcaacataagctggccatctacttacagtagtcgaatgcagaagtataccagcttgacgactttgccaccagcttatgttaatctgggctgttatagggggtctcaacactggcgtacattgtgactttatgtagttttttcatttgtgttcacctaattgtacgtcggttatgtatttgtataactggcacataattttatttcactaaactaaatactgacgcagatggataatgttcaaaccatgtaaatatatcaaatgaaatgtttcaacaatatgacaatgtaaatacatatgtgtatatactgctacacgaataatgtaacaaatcaatctccacgcgggccagtcctacgacgtctcgaccgcacatacactcttcgatcgtcgcgtacactgcgtgccactgtaatacactcatccacaatgtcgtaggtttcggtgtcgacggtcaccatgcgcagatctataagtctctgcaacctatctgcaatggtttgaaaggctccctgcaaacaagttcgaataaactggtcaagaggtcaccaaccaataaatgatttaccatttatgaatactagaatgaagctttcattttatttaccactgcatgtcgaggcatgtcatcctgatcatctgcagtgtcaactgtggggtctgacatgctaggaggtgtatcaggtgcggggtctggcactggaggaggggctctgacttccccaggctgaggcgggcacatgaacgggtgcgatatctggtagaaccagtccatgtatgcagcatcgcactggccggggtaactggaagggggtcctgtgataacaagatgttgtgcgtactgaagccaggtctcatccacctcttcatctaacggggtgggcaaggtgagaagagacgggacgctctgaatgaagccgaactatctgagcgccctctctggatggtacttgacgcagtatggaccccatcgaatatggccggagtatagacagatcacctcaaagggacaggccgcacggtgatccgtgtatggagtccaacagacagcctcgcttgtcagcttatctaggcgcctccgatacgtactgagaggtaacgccttccccggcttccagcggcaggcccgtggctgactctccacataatcctcagctgcaatcatgttggcaacggcaggaaagtgctcgtatacccaacacttaagtaaacaaaataaccaaaaacaaataagctgttgaaattcaaccaaaacattaaataaataacaaatattaacttatatattaacaaaatacctgaagcagactaatataaccagcaagatgtttaacatgatgctgacaggcatagttcaagttatcatacatgtgttggagtgcagtcgcaccccaactgaacccgcctgattggtgtagatcacgaaatgcctccaagaataccacaccaatatgtgtggcactcttgttagcgaaaatcatgcaaccaaccaaatggagcaaataagctctggctgccaccgtccactgcatctgctgacacctctcagcatacaagtcccgcaaccatgacagacgaacataagctccatggcactgtttcgtctctgctgcagcctggtcgtgggtaacctcaagcaactccacaagcaatgcaatggcctcatcaacatccaaaggggcgtatgtctgcaacgcacccatgactggtagatgaaagagagatgcgacgtcgtccagggtgatggtcatctctccgatgggcaaatggaaactactagtctccttatgtcacctctctacaaatgccgagattaaaccccggtcacctgtatctaccgaacaggtgatcaatgggcttaatcatgtacctgccaccaacccttcaatctcaggcgcaggccggccaaacttctgaaccttcctcccatgggatgccaacttcagctcgggccgttcctgtattagtggttagttacatacacataccctaacgcgaaaacaattatcaaattgaactatgtttaaatacaatcatacctctcccctccaaatcctaggtgcaatatgctcagcataatgagttaacactaaactgtcatcgggcccaccgaaaatccgtcaacatcagaggcatcgatgcttccctccacctcagcctcaactggtgcactatgctcaacatcgtcagcggctacctcagcaggcacgtcctcaacaacatcagtcctctggcgttgtctccgtgctaatgctgttggtcttcgccgtacagcgggttcttcttcactggcatctcttgccaaagcccgccgtaatcctatagtattagccataatctgacattgaaaccaagtaattacattacaatcatagccttcttcatcaaaataaaactttcagataacgatacctatcaaacatacccatgtggatcagaaaccaactaccaggtccataccattacacaacattattttcaaataacagttcactttactcataacaattcaaattatgtagaaagtgtagatcatgaaaccatagccatgtggacgatcaaaaacaatctagtaaatccataccattatgcgcatgacatttcacacaacaattttcactacatggttttcacataacaattcattgtggctatcattttgctcatgacatttcaaattacctaccaaatgtagatcatgaaaccataggcatgtggaggatcaaaaccattctgccaagtccatagcattatgctcatcacatttcacataacaattttgactacatggtttacacaacatgcttttaacataccaattcattaaatcagttcagttcattcatgcaaaaaattcttgagccatcacacttaatcttcaaatttaaaaaaatcaaaaattaaccaaatacccatacggattggcaatccgtaaggcatacggattgacaatccgtaaggcatacggattggcaatccgtaaggcctgcggattccaatccttcttacggatccataatccgtacattccacttgatacggattctcaatccgtacgcatgcaagacaaaacaacaagccattccttcttacggatccataatccgtgcattccacagcacacggattatcaatctgtacgcttgcaagacaacgaaaagcgaaacggttacttacctcaaagcgccggaaaacaggaagcccttcgtcgccgacaaccaacaaccaccttccacagccggagagaggagaatcacaacttggcaacgaccaaaatcgccggaagcacagagaacccaaggagaaggagaagaagcgccgaatacgaatgaatacgaatggattggtgtattagaaatttgaaaaatgcttttgttttattattttaagcaaggctatttgtggtatttcacaaatacctgctgggtgtataagcattttgactggtgtaggaagcaaacaccaaattatttttctttttttcttcaaggtccagcccatatatagactacattttttagtgttaacttattttgggctttgacttgtgttcaacttaaaattttgtccacacatatctatgcatcaaaaccaattctcctccaatcagaactttaattttgtgattaaaaaacattttcttcggttcttccagattttgacctgtaattgtgacagcaatattgcgcttgaggcagttaccacaaccacctttgacagctaaattgatatgaatccactgcattttactgttatcatctcaattcgtgaatgcaacatcactttaaataccttagtggattcatattttttcagataatcaaattaacatggcttcttcatatgttttattcatgctttctctcaacttcttagcctcaacaacaattgctttgggtgggaatttcaacactgattttaacattctctttggagataatcgagctaacatacaagatggaggctcaagcatgtcccttgcaatggacaaatcttctggctcgggcatagcaaccaagaaggagtacttgtttggacaatttgacatgcaaatcaagcttataccaggaaattctgcaggcactgtcactacattttatgtatgactaacttgttccaagttaacccatcattcacttgcttattctctcccatccatgcatgcacacacacgtaaacacattacaacatacacatatactacataatatattgcataatattcatgcatattactttttcatatatatatatatatatatatatatatatatgcagctaagctctcaagggccaaaccatgatgagattgatttagagttcttgggcaacttatctggtgatccatacattctctcaaccaattattatgccaacggtactgggggtcgtgagatgcagttctatctttggtttgatcctacacaggacttccacacctattccattgattggaacactcagcgcataatgtaagtacaaaataaatttatgcataaaattaagaatttaatttatatgcactcgtcgttataaagctttttttatacatagacgtccaattcattaatatggcctagtcatagaactaattaaatatcaagatgcaaaaaattattagcagacctgtttatggtgccaatcttaatttatatgtaacatgtatttaagttatttaatttataacacttaatatacatataatgtaaaaattaattgaaaacataatgatctagaaccacatacttaataatttttctggagatacatgttgtatatgtaaaaaaacttttattctatcaatcaatcaaaaatcattgttaatattactcgataattattataaaatttaataaatttaccataaataaatatataatgtttatacttgaatgacagttaaaaaaccttttagattgcttgtgaaattacaactcattcaatagtgtaaggaacaaaataaatttgtataattctacttatgggtacaatatagcataaatgtgtgtttttcttttttgtgtgtttgtagaatcttggtggataacacacccatcagagtgatgcacaacagggagagcatcggtgttccattccccacaagtcaacgaatgaagatttatgcaactttatggaatggagacttttgggcaacaagagggggcaaggttaagattgattggtctaaagctccattcatacattcatagcaggtttcagaaatttcaatgcgaatgcatgcattgctggaccagggacctcatcttgcatgggtttcaatggtggaagaaacaaaggtcttgatgctcaaatcaggaagcacctcaaagagatccattcaagattcgttgtttacgactattgccgcgatttcatacgttttgctcatggttttccacaggattgccgaaagaataaacacttgtgacttcccattaaaggattgcttgatcattatgttcatgggcaaaccatgcatgcatgattataatgtacactgaagaatttttttattattttagaaaagtataaatgttcagtgaaaatatttcattctattaaatccagaaatatgtacgtagtttttctcaatcaaccattgacatctactgttaaaaagttaaatacatttttaatatggtttatgtaattaaccttaattacgcatgtcaatgatcgttttgagtgcatataaaaggtaatacccacttaaaaaaaatcaatttcgatagagttagaagatctttatatttgttcacctcaactataaaaaaaaatagaagattagctttgaatatctttcaatagatagaataatgatacacatacataatccattttaaatatttcaccaatatttttcatttctttctatcatgtcataaattctattatatatataatttctttttctttttcaactctgcatctaagtgtaagatagcattatggatttttatcaaacattttttaaaatgggatgaaaagcaccgacaggaggtgctaaccatcggcccataaagaccaccaattcagcatggtccttctatcccagtcttcgacttcttttgttaggttgaacaattgccatatttgacagctcaatagataaagaaataaatgtatatctaacaggataaggagataaatagaatttaaaaactattaaaatgagcgttgtttgtagttatagagtgtgcatatttagattatacacttattagtcttgtggttagagaaaaatatcttactcaagaatattaatcaaattttttgaccaagattaattactgacaaaatctatatatattttatatcaccaacagatatcattcctcctaaaacaatgttctctttcaactctttcaactaatttatgcgtccctagagagtggctttttgataaaactctaataatataatagtaaaaagatacttattattagccacttgcccaagaggttttttatacatgacatttcataattgcagataatatacaaaaaattatattgtttttacaagtactaaaatggtacattttaataagattgtttttatgcttgttgcttaaaaaaccctttataaattacagcttttttttgctgattttaaaacgtacctctcacgtattttcaatgcattttttatttgcaacgtttcactccgaagacaacaaattaaaccatctaataaattttggaaaatcacaacaaaaaaattaaggaaaattttatggtgtttacatatattgaaggatattgataccttgaatagaccaataaataatagacattaatttgtacttgtaacttttacctataggtaatatggaattgataatatgacttattgtttagtatcttgatattttgtaattgttaaacgggccttgaattactttgttgcccattccatttacagtagtacatttttcatgtttaatattttaaaattttgaaaatatgtgtagttataaaatttaaaacaccattgaaattaaatgctaattaatttctgatgtgattttaatattatttttttattggtacacaaaggtactaatactctcttaaaaattaaaattttaaggtaacaaaacaatccatatatcaccttatttaaaacaacttgaaggaattttactttagatgaaaattgtactccaaacatagtacacatcgttacacgcacactcagaatatacttcaagttgagatggaactgtttttaacgtttcatcatcacttgagttccctccatgagcgtttcaattcaatttaaaagcacttattctttatataagtaaacagaagaagcagaaaaagaaagaaagggaagtcacatactgacgcacacactgctataagtctataaccattggcattgacaccaacaccaatcttcatccaccattctctggaacaaccagtcagcgtccatgcctccagcttcaagaaggaaaccaaaacaagccaagaaacacaaaactgtgaccattctcaaccaccattcttctcactctgatcaactccaaggtaatcactctttactacactctctatctaccttccccagccacctacattttgttgcgtgtcctctttatctttatgtccatctgttctttgtacatccttgttgggtatcctatgtttcttattgttactttccttaatcttatttttgttaattttcttgtttttcattcaataactattaacacaaaactggtttagaataaggttcattggcagtttggcacccatttgccaaggttattatgtttgttattttgtgatagttgaagagaataatatagggtcattctttttacctgcaggggcagctgtttcagcaaaccactgcaagaaaatggaaggatctctcaatggaacattacaagacagccacaaagtagaaacacaaaattcgagagaagataaggaggtggttgttgaagttgatgattcccaagttggtgatatttccatcactgatgaagaggcaccaccaaatgaggagaataaggagctggttgactcaggcaaagttgaagtgacacaagattctgaatcagtttgtgagacttttgagcctgatgctgtgaaagatggtcaagttgagaatacaatggaatcagatacaatagagttgaaattgaaggaagaggaagggaaagattttctatctgacctagctgtggttaatgatgaggtgaaggaaacggatttgccttcttcagagagaaataatgagctcttttcagtttcaggaaatgagggacagagagaaaccgaagttgtggttgaaacatttaagcacatgatgtttggtggagaggagaagaatgttttgtcttcagttgtgacagataagttgcttagagagagtgaggaaccaaatgaagtctacggtgattcttctttgcctctaactgatgtgacttcagaggaaactgtggagacaagtgttctaaaatcagatgagagtgaccaggttgctccaaccataattgagaaatcattggattttgagccaacattggatgagaaaattgaggaaccatcaggtggccaagaagagtcatcctatgaaagtgccaaggagtcttttcaaccatcaccaagtgttcctgatgctgaaagcactgaaaatccggtgggtgattcacactttatgatagtttcatatagacatttcagtttgtgctaagcaagtgttggttgtaaggtttgcctttgtaattttatatgcatttatggatgtagtgatcatactctttttgttgtgacagaccattgttcctgtggctcaaagggaaaacacctcttggaagagttgctgcggactctttgagattatgagtggtggtgatagataagtcaaggtgagtaaacctcaaccaaggattattctttctttgaccaataataaatgataaataactgattaatcaaatatttgaaagggctaatatgaaacttaattcagctcatgaaagtgacttattttctttgtacaaatggtatatagcttaattatgataggatattatttgggtctgaagtagtattaagtgtcactataataacatctaaacctaatggaaatatttcacggtttgacttggagaccctgggcatacaaattatacattttccttattttaagactttgcgtaacccactaaagagaatagtctagttggcatcagaatctttttattgctttttgtcttgttaagtttgaaacaaaaaaaaagtatgatatggaaataacaacgctttagagctgttgtgctttctcaaacaaaattttacaactccctttcaaactgtcggtaaaacaagggttaaaattgcttcgatttaagtatcagaaaattgttttgattaccttagctgcaaaatatgacgttaattagtggcttttcaaattatttggacattgcaaggagaatgataagctgctatgcaaataaaaacttgatgcgaagcagcctcaattgtcagtgttgaacagaagtacgagtccaactgtgtatcaattaccgacatattagtaatgaaagtaactcctctaaacaagaaaagaattgaaaatatttgcctgaaattttatcatgcttactgatgaatggtgatgaatacaatctagcatgcattttatgtcaatatggttacattggtggttatcacttataacttataacttttgactgaatgcattgagggtggaaactctaaaataattttatactattattcaattacaaatcatcatatataataatttattaattttataataatttttaaaatattacattaataataatttatgattaattaataattttataccgatactacgtagtaattaaacatatatttttatttggccaagacttcggttctgaaatctttagtgaccacagacaaattcaatagtactttaggtgcaatttggcagcattgtagtaatgtggtttattgatttcaacaataatttcaagggatattgatatatgcgttataatcactgatgctcctcaagagtcaaaagcccaagtcatgtcaaatttctaaatactgagatgatattttaagaaaggatctattaaaatattggttaaaaattaaaataagaaattatttattatataaataatagaaaaacataaaaaaaaatataaataacataatttttcatttttaataaaaaaaattattttaaattacttaactaatgtccttaatacagtactttagcatttgtctttaagaaaacacttgtagtaaaactgattcgatcttcttgacctgaagattatcaacagtcaaatttaagaatctgatcatctgtcaaaattaattagctttgctttggggcaattttctaagttgtgaatcgttatttgattttttaatattatagggcagagcatcgtagaaggttgaaccttgagctaaggttactgaggcattgcataatcataggctgtgagggtgccctttcagacaaaatctttcctgcgtgcattcattgagcctcaaattaaggggcatgttctggttgctttcctgcttcgtttcagaatcagagtggttacattgtttcatttcaaaaatgacaaaatgtatggtatggtacattttagttgtggcatattgtaaacttccatgaactagaatttattatcaaaagttattttacattcaccacgttattatgatctatacgaagtaagctcatgtgtcatttcattcttcttctgtatagagatagaaatgccttttatcatagtttatcaaaaaaaaaaatgtcttttatcataaaggccaagggctaaacaaatgaactacaaaaaccaaagaaaaagggccattgctttgaaatgatacattcaaaggatgatttaagctgtcccatgtttggttgacgatcagcacattccattaatgatggttgagagaggaagggaatgtttggagcatgactatctaagaaacacaaatacttgtagaaattgttattcttaactccttttttataaacactaatagtattttagggtattggttaaaaaaaattaaaaaaaaattattaaaatacataaaattacgttattcatgacttttttactttctcatgttttattctctttaatccctccataacctaaactcttttaaacttctttcccctacttcccaacacctcattcctctccttctcaaactcttttgctcttgcacaattctgtcacacttgtccttcttctccattccccacttcctatccctttcactcgagctttagggtaagtttttttttaatggcatatgtaatggaagcatatttccgttatgtatctcaactagatacacaacaaaaatataacctataaggtttgatcatagctttagaaatggaacatagcccatactgtaatagctttgaagttgtaacaaactttgctattaaatttggtcaaatagttaattagttagatgttgaaaaattaatttttatagctagaaacttttaactgattgttatgctattattgaattaaaaattattagtaaaattagctgtcaaatgatatgcttaaacactataagtttttagtgtgtgaaatgcttagaaaaatctatctatttctcctctccaataaacaacaaaattgaaaattttatcttgtttctctctttattttcttccctattgtcagccatctaaacgaagtgcaagtgaaaggttctcttcctgataagatctatccttgccaggtgttgggcccaaaaattaaaggctgacactgcgtagctacaacgctttatgcttaccacacagtcttacaaatccaaagctgaaaattaaggataatttatttttaaatgaaagctgatgcactctgattttataaaagtgacactggtaatgagtaatgaccatacaaaatagatgccatactatatgtgtgctcggcaaaagctatttctacctgaatatcatgcaacttagatgctaatttttctttttttattcttttgggaaattgactttttagttcgccttgaaaaaaatcaatttcattttatatttaagcaagttattatgtagtaacaaaaaagtttaagccagttattacttgattgagccttcacctttaattttaaacaagataaaacgtaagctctttaaagcaggaactatttttctaaccgataataaatcattttgttgaatttggtgttcatttttatagggcagggaatcataaaggattgcagctcgcgccgggttcttccaatattgtaccatagttgagatttttacacatcagaatcaaattaaagattaaggggattttatataaacagactttcttcgcgtataaacaacattaacgcattaagtggattcgatgataataaaaattgaagttggaaaaccacaaaaaattctttgtgcctcactgaagaaaagaaagaaaaattccaacaaaaatgctacagcttcacgaaatttcgcctcctaagcagttaaacaatagcttagtatctatcaagttatgtcagcaatagcttagtaatagtaactatccaacgttagcatagcaatcgacactacttgtttgacaattgatcttcaaattcacgaaatagacccttgtgtctatttaaattaaagcaaaaggttaatagtactagtcaacttaacagaaactattaaaaggtggaaagaaagggatgcaatgcaagccaacgctttcaaactccaaacccaccacctacaactacaactgaaaaaaaattcaaccaaatacaaattcttctgaatacaattacgacagatgggatataagcatgggaagaaaaaatgaacaagacccgaaaaaacatctctctctgaccacattgcaagacaaaaagtcaataacaacaacaataaatcagtgatatcatctaatcctgaaacatcaattaattcagcaggtgggttctatattcaaagccatgctgtgaaaatgaacatggatgcagaaatcaactttagaaacagaatagcttgacaagaggtgataccaagtgccgccttaaactaacagcagtgccattgtttatcctccaagctaacaagggtcaaactaaacacaaagaaacaagtaatctcaattttgcaacctatttattaaatccaacacacaatggtttgatcctcataataagcaactaacaaccaaaaaagaagtatgccaacttcgacatgagcaaaaaattaacaggcttcaaaaacaaaagccagagaagaagcattattttgtaacaaacaaaattgcagcagcatagctatgactactaaagacctggtaagtctaacctctagaacctcctccagttcaaaatcccctcgctccttgatcactctccgatgagacagaaaatcacctccgttttccatagcacacgtagattacagcagcagctgcaacaatagctcctgtagaccctgctgccaccactggccactgcaacttcaatcccttcccttcaccgtgtacactgtttaaacctctatcgattgactcaacggtctccaccgccttctcattcagcgatatgatcaccctctcagcttcctttgcttccttgcgcaattgaagaatactcaattccagaccagtcactttctcctcagattctctaagtgcctcctccaacctcaatttatgcttaaccgactcatccaattcagtttttttctctgcagcaaccttctccaattcctcaaccttctgtctgtaacccttaatttccctctccttttcatcaatcttatccctgatctcctcctcaaatctaatcctcttgttcctttcctcaatttccttagtctccaaaactccaattttcctctccaaatccctaaccctaacctcactctcagccttcaccttcttcaatcctgccaattccttttccagagactcaaccctagactctttctcccccaaaaccttcctcaattcggcggcatccgccctcgcctcctccgccgcagtcatttctgataccatatcgtggtgcagcctcgccacctccgtctccaggtccgccgccctcgcggcgataacctccgtcgctttcgcagcatcacgcgactgtgccacttctctctgcagctcttcgatcttctcgcttttatctgcaccgtcgctcctcaatccgtcgagctccgccgtcagcttcttgatctcctccttcctcgccacgttttcgctcaccaattcgtcgcgctcgcgttgcaacgccacgatcttagtcgccgattcctcgccgtactgatcgtcaacgccgccgccgttggcaacaccttcgtccgccatggttgattctgccaaacaacgaaaaaacgcaaacaccgaaagcggttaattaagccagaaatcgaaatcgaattgcaccgcggaaaataaaataaacaaaaaatgaaaatggattgtaattataagctcgaagtagctgattaacggtccgtgaatcaaattatacacggaagtaaacaaaaaaaaaaatgaataaataattgttgaggtacattcttatgaagcaaaagcaaagagcaagagtaaggtaaggatagtacagagtgagagaaggtgtgaagagtgtgcggttgtgtcagcgagaaaacggaagataaattttccaggaaaaatggggaggattttccgggaaagtgacaaagttttatgaaatgggtgtaactagggttttgagtggtgtagtgtgcgtcaaaaatatcttgaaaactttaccattttcgttttgaccttttccttcacaaaaggaagtgctcagaaagtgcgatcagaatcaaccgacggttcagatttgaaattatgttctccgtgatgtgtgcgccagacgccagcatgtcaaattcgatcgggtaattccattttcattttttatgttcggatttgaaaacacttccaaattccaacacagatatttagcataagaatgttacaccatttttttatatatgtcatgtatcaatcaataatcaataataaataaataaaactaaaaacaacttataatgggtgcaccttgagattgtagagaatgacctcaatttgatttctacataatagtatatctttaaagaatacaagattaagctcgttaaaacagtcaaacaaaaagaaaacatacaagggaatcattaaaagaaaatcatataattatatatatataaagaggaagaaatcaaattattaattacttcatatattattatactaatagcatacacaatatctcacattttaaaatatcatgatataaatagacatacaaaacaaagtaacaattatcaatcatgcaatatatgcaaacttaactcgatagagattgttaataacttgggcaatcaaccacacatgtttcttaaacataatacaataacaatcaccacccataaggtaagaaggtaaagcatgcctaaaatcatttgggtagattaattgtatcaatttagagattgaaatttgcatttctttgccaatatctctcaactaatatttgtaacaagattagcgccttgaaccctcttttaagttcaaatacttgttaaaggttagcttacaaagggacaaatgacatgcaactcacaatagccactgctttttctttttttttttttccccaaatgatcattagttgaaaatgtccaaagacacttacaagagtatatataggatgctaaagaagtgtacaacaaatatacgttagcaaatcaaacacgctcaaagctcaatagataaacatattagtaaactatgaacacaataaaacatgcatgataatcacatcctcccattacaaacaaaccttaatagagtctaagattttctacgcttatttcttttgttttgttatttcttatataacgacacttgtccaacaacaattcaaactgagttggcccaaaataagtcataactaacctgattaaagtagtgttctgtagaagacctcaaaaaacaacaaatttgagtagggaagtgttgcctaagtaactttagtttggatacaattgcaaaagatggtagtaacaagtttagttgaaaggaagaaatgtgatgggggaaaaatagagtcaaaagagaaggttacatagagaaacacataaggctttgtttgggagagagattttggagggaaagggagggaagggaaaggtttagattgtgtcatctccttgtttgagagttttaatttttgaggaaaaggatttgaggatttttaaaactcctccaaaatcctccaaagcttaaaaattgttgttcccccaatttggggggtttttagaaggaaaagtaattaaaattattattataccccaactacaaatttcaaaatatattaaaatatatttttacatttaaattatataattttcatatttaatatcttattaactctcaatttccctctcttaatatatttttaactcccaaacaaggaggaatgaacttccctcattttcctctttttccttcccctcccttcctcttgaatctctttcctttccttcccctcctaactcccaaacaaagcctaaagtaaaaaataaaggagatgaaagtgatggctagaaaaagaatgggagaaaggttaggtgaaggtggtggccagaagagaagaaatgtgatcaatgacagagtttgacaaattatttcaacgggaccaaagtagtaaatgatagttatactcaatactaagaactatagaattctatttcaaaagacaataataaaaatcactaagaactatatcaatcaatatactatagagtcacattaagacatgagagtaaaaaaaattctaaagaaatttaactatttaagagaagaaaattttctcatatctaataggagttattgagataaaaaaaaaaaaaaaaaatccactaaaccttaagagggagctgagacaccactctaagtggagaaagggccacaaacatttgaagggagagtttaagttttgtctagagatcatgtaacaagattgtaggtgtaagtaagtatgaggtaactacgataaatcaatttatgtgatcttttcttattttcttgtagtattttctttttaatacatcttactatatattaatatagacttgcaatatttgttcaaacggttaaatttttgttcgagaataactatattacgaaattaaaaaaaaaaagacaataataactatatacaggagtaattctaacgtttgaaatttttgtgtgctaataaatggaaattttttagttaattttttaattttaataaatattatttatatcattttaaatattttttagatttttacttgtattgtatttgaatttataaatatttatgccatataagaaaactaattctaatataaaatagtaaatataaattggacttattcctctacttctgcgactatttcatccccaacccaagaggtctcgagtatccactgcaggttatccaacatatattgagtgcatccaaggaatggttttatatttattgcaacctatcacgtaagattttttattaaaaaaaatgggggcttcagccctccttagtaaccaaaacaaaaattatttgtcttgttttttaacctcattctccatcatttttgttaaaaacttaaaatgatgtatcacttgatttttaaaaaattaatgtttctcttttaattattattttttacctgataatttttctatacattcaacaggagtactgtttgtatttaaagcataaataattaatgcttaagtttattatattttataatcaaatttaatttttaaatacaaaattacataagaatgtgttagtaattgatatattgataatataaaattttttatattattatttaattaaaaattaccgttaacatgattttggtattacaagtctactctgtcgatgaagtggcactaacatcatataagaagagatgtgtgtaaatttctcccctgcctgccaattcctttgaattgtacatgagcaaagctttataatgttgtttcatcagtgaatgtggcgttacaatactggtggaggttattatatatatatgcactctttggagataaatttggtggttatgtagatcagtaatagtcagccacctagaagttagataactcatacatgttgtcaatgttgaatgttgatgctgcatgcatgctttatgtgctatgatggatacatattgttgttgttcacaatgtcacacgcccaagttaatttctgcctacgtgataagcttttttatgattcggtctcaaaaaaattgtggtggctggggctgtgattgtgactgtgactgttccaggatgtttgcaattggagaatgcagatgggttgtttcagcaaaagcatgctggaatttgattgccagagtgtggtgttctgttggatctccaaaatagtgactgtagtgggagtgcctttgctgtagtaggtcaaaacgattatttaggtttttttttagttaaataatattggagatttattttgaattattatcgaaaaatgaataagttgtaacatttattacgacttttgaattcaaagccacatacgatattactatttctattttttttaattaaagttgtacaatattttatgacttaaaaaaatttattccttcgactttaaagtcgtattaaaaaaaaaatagaagtcataatatcgattacaactttcaattcaaaagtcataaaaaatgttacgacttattcattttttgataataattcaaaacaaacctccaaatgataattaactaaaaaaatatccctaaatggtcatttcatcggtgtaatagtagtcatgagagtcttggttttatctcattatatcttcagtcctatttatgaaaaataagtgataatatattttatattatcacttatttcgtatgaataagattaaaggtagtatttattactatgcccacaattttttacatgcatttctttcatttttaataaaatttatgtatttaaacatagaaattttgacattatatatgatactatatatgtacaatatattctaaaattagaggaaacaactttttgtgttgtatcaattttactgattgaatacatttttttcttttttaagcagtgattgttaactttgaaagaaagtgagctgcttttcctaccactaaaaatgcaagcaaacatattaaagttagtgactcttgttgttatttgtaagctatgttccatctttgaaatacatgcacagggtaagaatcaagaaggttaagagtgatgcatctccaacaaattaatggctgtactatgattcggctaacactatcatcgccaatgtgttcctttttaccttaaattatggaagatcatgttatcctcggatgagaaagaagccatgtgaaatttacaacccttcaagtgggagaggtgctgtcttttttctttctgtaaaccgcattctaagtctaagttatcgtggtagtaatggctaactgccaaaaaagtcaaacaaccctattccaaaatctccaaagcaaagttttcacaacaaaataagaaagaaagtgaccaatgacaacatgtgtatgtgccatgttactttataaaacgtctgatctcatccagatttcatgacccaataggggtggcccactggaccaagatgaactaaaaatgaaccctgtcacagcccacgtacatcgaagccacaccataatgtgtcatacacttgcatctactctaactttactccactccagatcatgaaacaggttaataagattcctacaacagttgcctaaagtcaataactccttctgtaacattaatctgcggcgtatgaatatatcaactttcaagaagatatatagataaagtcatggaaaaaaaataacactgtgaaaaagaaagaaagagctgatgagaacttcaaaataaaaaattaaaaaattaaaaatctaagaacatcgatcatgggataaacattttccttgatcccaacttccaaaagtacatcaaagtaaaacataaaaattaaaagaagaaaaataaaaattctaactaatggggtctgtgggaaaaaccaaaaggacctaacctaagctgcttgcttgcttccataatccatcatcatcaccatggattattcattcattcattcatcatctcatgttgatgttcaccatcaacctccaaactttgtcttctccttctccaacttttcaaagaaaccagtgagagccctcaaggctttgacttggtactgcaaagcaagaatatagccagcagtttcatcaaagagcttgtccacacctaaagactcaccaccaggcacaatcctctgtaatgcatgaatcttcctctctatatcttctctgtcatcaccctcatcttctccttcttctttttcttcatcttcttctttcacagcatctttcactgccacttccttcctccaccgcctcctgctgcggcggaaaacatgcaaagacttgtgagaaggggtgggagagttgtcgttgttctgatcttctgcaggttttctgaggaatgtgggtatgatagtgttatcttcttgttccatggatgatggtgatgacatgtagttgtagtactaatttgatgtgtgtgtgtgtgtgtgtgtgtgagagagagagagagagagaagggagattaatgtgtgagggagttatatgaggtgtgattgtcttgtgtgcgaaggagggagggaaggaggaagatgttaaattattgttgagctctagaaatgtcaatgccaacgaagctggtcccactggttttggcctcacaacacaaagaagaagaagaagaagaagaagtccccaagttttggattggagcgatgaggtggccttcacgctccacatcaacacccctcatcaatttttttaccctcccccttctaaatttgtttatctttgtcaagttatttttctactttcttatcttgtcacgaatagttttatatgataaatttgtttatttttataataaattcaaaatttataatgattttgtctttataataaacaaaatctaaatgcaatatcataaatactgttgatgttgttttttttttatcaacttagagtttaatttcgataatgtgcataataaagaattttattaaatattactttgatttaccgaaagaaaaacttaaacgaacccgcatctaaattttatctaatgcataatcctttgttacaagaattatagaagtgaaactttaattttgattataaaaaaagcaaataacacttatagatttgtatctaaattttatctttataataattattttagaagttatattaaaaatgtttttaataaggttatagtataaaaattttataataaaattaaagtattatgttaccttttcattgcttattatttccttccttggaggttgggataaaaatatcatagttttctaataattattgataaaaatatgttaaactaattttttttaaggaatcaaacaattagtatttccatagattttagagggtgttgcaagatcacaggaaagtggcatcttagatgcactaaagggatatttatgatcaattatagcatgctaaacacatgcatcttgttaatagtgtataaaatatgtatgggcattagattttaaggattcttaagtagtaagattcaaaagaggattttggagagaggggtaaaggtgaaagtataaagtttagaagtgactgcaaaatgcaaccccgttaaggagcataaaaaatggtcccacagaacacaaaagaaaggggagaaagcacatgtgctcacatgaattccttgaacttaacacccacccatgtgcctctccactctcttctctttcattcatatgccatgtgatctccatcactacccttcgcatgactgccacgtgtttactttccaatgaccccaccttgagccccacaaaaccccccccttctaacccttttaggccaaattaatcatgtaaattgctagaatcatatcaatcccaaccctattcaactaacaacttgggattttaaggaaatcaaatactccttgcttagcttatttaggacaagttggttttctggataaagaagttaagttcgcatttaagtggctttttcgtatcaaaatacgccactcccttaattaaagagaaacatgactacaatatgtttattaaatgatttattatgtcgtatccacaataataaatgcctgtaaaaaaaattcaataatctgaaatgaaaggtatcaactgccttgaatggttttcaataaaaaaaaatgttgcacagataataaatttaacagaacacacaaaaatagaaagacgttctttattacattcttttgaacactttttttaattaattaaaatttattaaaaatatttagattttgtgagtctcatactatatttaattattatttttctaattttatagtttttaataattttataataattaaagaggatgtgtgttaagaacatgttcttaaaaacaaaaattattgatcgtgagtaaaaattaaaaaaaacacataaataaaaggacgaaaaaattgaacgtgatgaaagcttgagatatttgtaagaaagtaaattatactaactatttttcaccaaaatgagagagagagagagagagagagagaaagaaagaatacaatttttttatagccgtttattatttatatttaagttatataattaagaaacaggtaaacggttatacattgaaaatgtaaaaatatttacacaataattcaatcataatttataatatataataaatttattaactttaaaataattatctgaaagtaatttaaataataatatatcattatatgaaattataaaattattttataatatcattatataagcattcaattcattaagaaatactggtaagaataaattatacacaacattataagataaaaatggtagattaaaaatttgacaaagtagatggtgttgtaagtgtgatgatactcataaagagagtgaaaagatgattgatgcatatatatatatatatatatatatatatatatatatgtttgttaatttggtagtgatttgggttgcagctttggtgatggtgagcgtaattagtgagtgtggtggagaatgagagaggggaggtggtggtgtttccaagaaggaaaccaatcggcggattgggtcattgggattgtatgagagatttggttgtgttgggcatatgggactccatgtgctcagacccactcggatccctctgttcttgtcacattcacacactacactacccttttttttcaatccttcgtaattctttttcctttttttaattttgttctggagggtaatggggtccgtaccaccatttcttgtacgaaaattgaaatcaatttgttacataggggccttgctttgcttggcacatatatcattgatgagagagctattataattcaatctcatacatctaatctaactgcaactgtgtcgacatcctacctgagttttgtttctgttcacaatcttttaacagacctttggacttattaacatctccaaaatcatcttacggtgcaaacaaatgaagctctcacatggtaggcctctagggatatacctattggcatgtttccattatttcccctcctagtaggtcacgaggacatagatatataaaacataaaaaaaaaatacacataataaatgtttaacatgtttaatcatgaatattaaataacacttaacttttctctaatcacatttatttttgttagaaacaatcttacttaaagaatcgttggtcagatagtaaacatgaaaacttaaactttgattcgtcacattataagatactaatccttctctatagacctaacccatgctgataacatttgacttatttaagcatattgtgaatgatgataaccaaacattgaattaatcatctttaattaaagaaaattctatgaatataaatgaactaggcatgcatgatggcaccacaaaggttcaaacaaggaaagggaagttttagcatccatttttaggatgcgtaggtaaatggaaaaaaaaaaatcactggagcaaaacttattgcaacaatatcagcaattaggtttagaaaagggaaaaggaaaaataaatgcatgcagctggtgaggaatattcacagttggtcttgtagagagggaggaatgagaatttttctcaacctgataataacttaatgatcagcacatgaactgactcagacttttattggtgagccccgcgtgttctgcagcttacatatgcagtaaatgccaaacaataaacaagcgaccagatcattcaaatgcattatctcaatttcggatttacctcattttctaggtcattctttttaatgtttttaatgtacgacattaaattaatgattaatgtaaatcaacaaacaatgttacagtacattttagagccaagcatctagtggctctttttttcctcctttttttttattatcttcaattctattatgtgggctgcaaattgcaatgcaacattattctgacaagactgttccaccaggttttctgatagattagtaacaacctaaacaagtctctttgcatcacacattccaccattagcattttaactattctgaagtaagaagtagaaaaaagcaagagttacaacttacaagtggttgtacattctgaaagcaagcctccacataaagttaatcttatcctgtatagctaggtattagatagagcttccaaaaggtagctgcagtaacttcctccacatggaaggccaatgtggctccatgaggggagaaggtgggcacatgtccgttcaaattttcaaaatcatatgaaatactgtgatgtcgtattcgatccaatgctcaaactatttgtttggggtttgattccaataaaacaacgaggtgtctatttttcttctttcaaaaaaaaaaaaacataaatagaaggaaattatgcaagcaccaaacctactttcaaggataaattgttactgtgcctaggtgaggaaaatttggtagcatttgaaccatttgatataattttaaatggaatccagttgttaaagaaacttgtgaggaatctgtttctataatggccaaagggggttaaaacactatggttaaacaatgaaactcctttgcgtccagtgtgtataacacgcataaaacactttacattttccacatttttactcgtatagtagtacatgtaccggtctgatttatttatttctacttggaaaatagttattgcaggaaattttaaaaaaaaaaatatatatcctgagcaaaggaatgtgtggattgaattacaagataggactcaaattcggttgtacagtttattgataactgaaaccaatgtttacaaggtttgaccagagaaagctggctctttctggggaagcactaactcatgtcatcgtcatcgtcttacacaaagcaccaccagagactactacttctccactatgaagaaccttttcttaatctccacaaggatggctccacctggccaaactatttacaagacaacattcttctagaacaaccttgtcatgccatactgaacaggtccaacctttctatgagcagtggtactaatcccaccatattgatgagcctttgactgcagcaacttcgtttcaatggctattcggtcatccttctctatcttgttcactcctgctcgtgtcatgaaaaaagggttggtgtcaatatttatagctatgtctggtgctattttggcattcacaccacattgctgagcaagttttgattgtaaagacaccttgtcagcttctgttgctgacctttcttgttttccagaggttgatctttgataatgattcgtagggggcataggttgagaaggaagaacagaacctctcataaatgtccttggatcatatgtacccttgacaacacttgcatattcgtatggaatcactggcccaacaacttttccaggttttgctaaacacaagaatgttagcttattgatgactaataatgcatacaaacttaacaaaggcatgatgataattgataacagtcacataccttgtggaaatttttgcagaccctgaatagaccttggcgcaggactttctgtatccctggaattattattattttcctcagttgtttgccggtttatgcaggaagcaatgtttgattgctctttcgagggtactatatttgaatgtacaattgttgacctgtcaatgattccaaaaaagagaaagcaaacaaacaaaagttcagtatgatgtaatctgattaggctccctatgaatgaaacagttgtaacagcaaatgcagcctggagaagatgtggattattttggtcgatttgatctcatgccatgctgagacattcaaagagcagataaataggatggtgggattcgtatatatattttacagaaacgtgaaattaaagtaggagattaagtggcggggagacatggaaatgaaggtatcgtttcaaaaaatttgtctagacaggatatgccttatttgcaagatggaaaacccgttgatatggtcttcaatccactaggggtaccttcacgaatgaatgtaggacaaatatttgaatgctcgctcgggttagcaggaggtatgaattaagaaaaagggcacatagaaagtaattagcagcaatataaaccatggctcaaataaatatcaacagcgggtttgaagtgaagggtatatgcaacccttagacttcactactactgatccacgtctctagtcgatgtaagatctcaacatttgactacaaggtgtaaacaccactttgatactgtattatgctatgtaaaaactgttggaaagtcaccttaattgcggtcatccttgacctgccttaattgcggcttctctgagctgtgccttagttgcaacctctttgggctgccttaattgcagctttgagggggtttatttagtatcgactagagatatgatgttaatataggttatgaagtttggataatcctcaccttacaagtgagttttgtgggattgagttatgcctagtgttgttcatgatttggttattcaagtaaccataaccataactactaaataaccagattacaagttgttatcataaccataaccataaccataaccaattttgtacaacctgttatgatttgatataaccggttattgttttaaaaaaccagttatatctaatgaagagatatcttaaatataatataatcaaagtaacctattgttaacaacccatgattacaaccaatgacaagtgaaacaatgagatacctacattagtgaattacctgggaagtgatgcatgctttctttcaggtggcataataggacaacttttaccactattttcctcgagatgagcaaactgctgtttgaactgatcaacagcactgtgaagaatatgcaccaatgaagggtaaggagagaataatagggtagaacatatgaataaaaaatattaaggaaaagaagataaacagttgaagtataaatcaataaaccaaaaataaaaaccttgggtaaagaaaattagttctctctgttccatttatgtagtctttcaatagttgaggatggtactctagaatctcacggaaaattaactctccaatttcttcctttgtgactcttctcctttcgaattcaaactccatttttgtaataggctggcaggatggttccctctcaatctttgaaagtcccttgaaataaggatcagctaatgcctgaaaatgtcaaatccttcagaattctaaagcaaggaattcacatattgttgcacatcaattatacatttctattgtccaaactccaaagaaaaagcataagctcaagaagcagttaattatctgagtagaataatgtttcaacacacacacacatacataagaaatagcgaacaatataaaaacctcttcagcagtaggccggtcttttggatcaaaggcgagcaacctttccagtagtcgtagtgctaaagggtctgcattaggaaatttttgtgcaaatggtataggctgttttttcctcatactagttaggtatctccgtgccttatcattgcgtacctgcatccaacacaaagattcaaaattgtaaaccagccaaacaatgatgttagtaaaacttagttaagaaaatacaaacagttttccctctagagagaaaaaaagaaactaccttggatatagtatccagcgagggagtgccaagcaaatctgtcatcagatccaactgatggacaacatgttttccagggaaaagaggctttcctattaatacttcagcaaagatgcaacctatactccaaatgtcaattgctggagtatactgcagtcaataccttaccgttagctcatcagcagacacaaaataaaactaatacaaacagaaaaccagtggattaagaataaataacagattggtcttgggtcttacttttagctattgatgggaaagaagataacagaaagcatgtatcatgggttgatatacaatttctacacacaaaactaatgagcatgaattaggtatggtgtgagtcaagattatgcataattaggttctctaccacttatatgatgtctgaaaatcttgaaaaagccatacccttgagtaaaatgatccacagagttctggtgctctataccaccttgtagcaacataatcctatagaaaagtattaagtaagcaagaaaacatcagcccctatgttaccaatacttttgatatgagggagcaaaaaatctagcaaagctgttgaaaaggtatgaaacaaacagagaaaatgttgggatggaataccgtccaaaacacagttgttggtgtgtcattgaaagcaactctagctaacccaaaatcacatattttaagtttacagtttgcattggccagtatattctttggcttcaagtctcgatgatagacatttgctgcaatgtgttgaaatgtaattggtgagcaatattgacattgatgccagcaaccttatgttgataaatagacaaagtaaaatataaaaaggacaaatgaataagtaaaacattttggcaaaaccataaaaatactatacaagtttaaggagatccaggaatgaggtgcaaaaaaaagtcaacaacagcaatagttagagaaaaaaatatagatgatccagacatctttgtaagaaaaatgctaaggaattacacaatttcaattacatgtcattgtagagagaaaacaagctatagccactagcaacacaatgcgcattcaaagaagatattcatgaacaagtaactatcaaatattgaagaataccagagtgaatatacttcaatgctcgaagtaactggtaaagaaaaaattgatagtgctcttttgttaggtcatcattggctttaatgacttgatgcagatcagactccatgagctcaaaaacaacataaatatctttaaagtccctcctagaaggaggcagcataacatgcttaatttcaacaatatcaggatgtcgaagaagtctaagcaactttatctcacgcagaatacgtgcagcatcagatacatgctcaaagatatcatgaatctttttaattgctactttttcgccagtatgagtgtcgatagctgaacaaacaacaccatagcttccttttccaatgacctcttgaattttgtacctgctgacattgccatagtcggagaaaaattccatttccattgagccctgtaccaaagatattaaagtaatccgcaaaggaaaatcaggcaagcccaaatttgattgtctacaaatgttaataaatcaagctaaagcaccaattgggaaacaaattttcataattgataaatagaaattaaaagtaataaataatttttctttgctatgttacaagggaaattaatttatatctcggaatccatgatccatccataagcttaatacacacaacacaaaatttgtgtgtgcaatagaatttacattatgaaactcagtattgaagaatcatagaatcaaagaaagagagtagaaattatatttgcagtaatctgatcatgtctgcatagattggattaacacaagaaaaataacaaataataaacataaagaaacacattgtcaccatacaacgcttcactccccagcttaacaaagccaaaagaaggggaaaatacagcacttaaaaccactcaacacatcacaattcttatgacaaaccaatattcattttaagacgaatattttttttcttcgccaaatcatcatttcttgtcattcaccaacgtttatttcggagagtcaatctcgtacaacgcacctaaagcgtgcaagacacatctcagaatacgtagaaacaaagaaaagcaaaagggtgggttgattgggatggaagatcaacctaggaatgccatctaaccagttcaaagaagcatcatgcaaatttcatcaacacattagacccccccaaaaaatggtgaaaaaaataaagatcttgtcaaccaaatgtcacgtgggggaaataaattatgtcacgtgatggattaaacattaggagagagctaactaacatcataacacagccccatggaaccaacttaacagaacctcactcccacactttgacttatgtaatctaaaattctcggtagcaagtagtaacccaccaacactaaacaagacaagattttatttttataattcattcggttaaactcagcttagtcccaaaaagggcaccttcataattcattcgggacagagaaaaacttgaaaaagtaatgatttgtatagcaattaattagagtaatgcttggaaatgaggagaacaaacaacaaattcaccttttttctttgatcttgctgcattctgaggcaacagctactccaaattaagccaccaatacgaaacagaagaaattcatagaaaggtaagtttcaattttggcataaaagaaaactcaagcacatttgccccacctaccccagctccttcaacaaacacagaatccaaataaagccccaccttcaatcccaacaccaaactgctaccgcccctcaatcatgaaatgacatagctctaacttagtgacaaaaactcactaatccgtaatccctctctcacacacccaccatagtgatcccagtgaagcttcttccaccaaaagcgcgtttgaagttggagctgaagaagcaaaaaacgaatgccccagaagaagagcacaccgacacagggagaaggagtgaaaaactatgaaagtttctgttgttggagccttgaaagaatgagttgttgtttattgtaagaaagggtggctcttctctctctctctctctctctctctctctctctctctgcttcgcgttcgcttgtgagatacggatttgggattcttattataccgaaggggcgtatttggtattttgagaaagtgtggagggtggtttcgtgatttcaggttccgaaagacaagtgacgaagtaaggtggcagatactgttgtggaattacctgtctgtcccctctccaacttacatggcacagggaatgtaccaaacacgtgtcaggtttaacctttcaacatactacgatattttttaaatttcaaattttcaatatagcattttttttttttaaattctataacatttatcatcacttgttttaattattacgatgaaccatcatctagtttcttattaacatgaactttttttataaatttaatataaaataaatagtcatttatatccttaaatgtgtagaacgctcacaaatttatcctgaaaaatgaaaattcaaatttttatccttaaaagtgaaaaaagtgtgacaaatttaatcatccgttaacttttgtccgctaatgttgattcatagacaaatttgtcagctctttacccaaaatataatttaatcttcatattctcctttttttaataattacaaacataaaattataataaacacttataaattaaaaaagcaaacgtaagttaaaacaaacataataataagtataatattgattaataagtataatttgtttgttactctaaaatttctattgtaataacattagatatagataatgacaaaatcaagttggatcttatatttttaaggattaatttaatgattgtgcattttaatttgtttgaatctcatattttgggtaaggtactacctcatatttttgctttgaaatttctattgtgagagtactttacccaaaatatgatactcaaataaaatttgcacagtcgttatgtcattaatttcagaacttgattttgtcattatttaatgttgttataatagaaatttcagaacaacaaacaaattatgtttattaatcaatattatgtttattattatatttgttttaacttatatttgttttcctaatttttaagtatttattataattttatgcttgtaatgattaaaaaaggaaaaatatgaagattaaattatattttgggtagagaactgataaattcgtccttaaaagtgtagaacgctgacaaatccgtccttaaatgtgtcacgtagactctttcaattaacgataacggactaaagttaatggagtgataaatttgtcacaccttttctacttaagggacaaaaaattgaattttcatcttttagggacgaattgtcaacgctctacatattcaggaatgaaaataaatatttaccctttcatatattttataaaaattaatataatgattagattatttaattttgtatttttcataaaattattaagtcgtataagtgagatattcggtgtcatttatcctgagtcttatttcatgtatcaagttcattatgaatcccaaaaaaaattgttaaaaaattagaaagaaaaattaatatggttctttgtagaagaaaatcaataaatactttattttcaattttaaaagtaagaggcgtaattagctttaaaaactttaggaaactaaaattgtaaatatttcaaaaaaaatgaccaaataaataatccaaattagaaaaccaaaactatagttaaaactaaattataacttgtccacttgcttgcttatattatgatcctaaacttaagactatgtacttatactaggttagaattaaatttattcatcttataatattctataaattagctgaaattaaaagtataattatatgatttttatgattataattttttaaatatatcttgctagttattccaaatgtaaacaaaatgaaaattgtattgacaattattaactcttcgaaattatggaagtatattacaaagtgttaaaatcagtacaaaatacgtgattttatagtggttgtaactttgaatataaaacaaaggttaaagagtttgctgattggattctaattttaggtgatgaaaaattaagaactacgacgatggagaagctgatattaacatttcagaaagtttgttggtgaagaagtgagaaagttcaattgaggatttagtaaagtttactaatccaaatttgataaaaactccgcaaatattgattacttttaggttaaagcaatgttgactcctatattgagagtattaagttcaattaacaagtatgtcatatatatcattatttcctggtgatgagaaagtatatctcaattctgattcattatggaaattaagttgataaagatattgatattcaatctaattactaaacaactaaatttctaaataatatgaaatgctttggacttcgatcttgattacaactagttttggaaaaaatgtgttcttttgatgctcacgagaaatatgatttttttttttattgtctttgaaatgaaacaagacattttgttgaggaatttaggtgtaaatattattggtgttagtattgttagtgacaataacacgggccgtaaggtgtattttttgaagaatgaacttgtttcatttaattatatgactctgctcatgtttgattttgcaacgagttagaaaaaaaaaaaaaactcaattagtttcatgttgattgctaagcaaattggcattgctttggtattttcacatattttacacgctttttgaaagttcaccacaaaaccaaacatgttatctatttgaaattctaaagataacaattttcacttctagtatgtttcgttatgtctataaacaaaaattaagggtaaacgcattatcgtacattttagacattaaagaactaaatcaggattttttatttttcatatattaaattgtcaattgtttatatattgaggaataaaataattctttattcttttttagaacaaataaaccaatgttatatgatactagatgatgtaaaaataatctaattcaacgcatgtttttttttattttacggcattggttaaacacatgttaaaattcactgttattaattaatgtcagtgcaagttcacagggtgaccgaataatgtagattaaaagtacactttaaaggcttctacacaaaaataaataaatcacgtcacataggaagaatgtgactttgtttacacatatcccaagagattcattgagcatattaacataataaataaatcaaatcaagatgtttgttttatacaagtatatatcaattattgtcatctcttttttctgttccccgtatgatcctaaacctaagctgcattatatttgccgaaattgcatgacaaatacacatttcgtagtactaatagacttcgacctttcttttccgttacacttactctacttgcacaacaataccaaacatcctaattaaccgcaggatttatcaatacattcaacagagacaaagtgaatcgttttcaaaaatcaaaacaaggatatacgagattatctattcaatcagattataaaaaaaaaaaatctactcaacaaccaaatgatcgagattaatatataaaattagttctatttagtctgtcatctgctctctttaatctgtagctaaagttaatttcaacttatattttgtgtgtgtatataacatattggcatactgcttgctggaaattggaataagaagtgctttttaagcttcccaatcacaaaattttaacagtataaaccatagaaaaatagttgaagatgaaaattatttccaacaaaacagttgcattagtgtgtatacattttatcgttttatagaactgggcattattctgaaagtgtagtttgtttagataccgtgaatggaagcgaaaaactgtgcattatgctttcaattaatgtttcaaaattttttcaattaatgtttcaaaattgaccaaggatttaacatatactaacaaatttgtcgctattcaattttctgaacggccattattcaaaggtaaaatatatgatgaatttctgtgaaaaggaaatatttgaaatgaaaatataccatttaaacacgtctttttcttgtaataaaacattaatagtacaaacacaatgatatctttgaaatgaaaatataccattttataaatatgtctttttcttctaataagacattagtaatacaaacgcaagaatgatattctgtgatgaaacaattaacaatcatatatcatagaaatgaaaaaaaaaagttcaaaattatatatttaaatgatagtactaaaaaaaatattaataatatgtaaaaaaatatactgtacctataaaaaatgtactatatatatagcaaagtaaaaaagtacacaaaaatatcaaaatgatgagatggtatcgatcctcattaatgtcatgaacgttgtggccttgtgggcatcgtccattttaaggagtggtgactcagaagttggggaggatgtgtaggtgttccaatatggtctgcatcatctcactccgatttttagttttaattgaaaattttaaagagtaaatgatttatatgtaaaaaaaattatattatcatttaaacataaatcatgatatattataggtttattatttgtcacaattattatttataataattatcttaaaaattatactagcacctgaaaccatttcattgacattttttttagtattttatacgaaaattatactccaagcaaacataattttagttacatcattgagagttattaaaaataaaacattacatacttttctccttgatgtgataaggagtagcatttagtagcggaaatgtggaatacattattgatttgctcaactttaattcaatatctacatactttaatttgctgtaaattttagcaatattaaagtgaggagcagcatgagcatgcttacgcaacgtagcacgtgcaacgcgtgtttcacgttcacgctacgctatctggactcatgaaccaacacggtttcgtattgttgttttttctttttactagagcttctgactagtgccattaaaatactaagtaagaaattaataataaattttttcatttaaaatcatgttaagaatatattcgaaattatgttaagggtgtattaacaacacatttttaaataatttttaataatatttttagattattggttactatttgttcttttttatttactaaaatcaagaattatctgaaacagaaaggatcttctttttttgtataatgttaataaagttttctattttattttcttaaccagtttttgtatctgctagcattttcctaattaaattgttaatataatatagtttttcaaagtgtgtatttgtttttttttttttttgtataattctaatccaacgtatagacgatagtcacatttagccacaaaaaatgaaatggttaaaagtatatttgtttttattctggatttagttaaagtcattatattaggttgattcaacatcactaatttggatttgctagacctccacgtctattttttttttaaaagtttaataactataaacactaagtagaatataaacaattatttattataaaggagtttagttttaataagttatcggtacaaaaaaaaaataacattattaattaaaaattatcttagatataacttttaaaataattattataaaaaataatattatcatacatgacactgactagataataaacaaataaatatactattactatattttaattaaattcttataaaaaaagataaaataatcataagacctctcaaccttataatatataagtgatatataaaatgtgaaacatatatatgcatggtttactgtgagatactatagaaaaaacgtagtttgatggttgtcattgatgggtttttttaagctgtaaaaaaaatgatgtgttttttaattaaaaatgtatgacactattatattaatctctttgaaagtaagaaaaatttaaataagtttttaaatgtgcagttcgtcaatcacaatacagtccaaaacttaaaaaatgtaacgataatattaacaaataaataatagtaaatggttaagtttaaagatttataaaaaaaaaaaaaacttaaaatatcataaacttatattaaaaaataatgttaaaaactaagaggacaacgctataccaaaataatgtagtaatttactaaaaaagagtcatcataagaatatactaagctaggtgtttagatacatgaaaggttgtccacaacctccaatatggacattttatctgttctgaaacgtattgttggcgaatcagcaacccctctatatatatatctccatttcattcgtgtccctcttctcattcaattctagtttaaattaatgcaaacattgacttgtaaaaaacaaagaaaataatcaccaattcaggtttcaacgtatggttggaggttatgtgacgtaacaacaacagtaaaatagtataataaattgaagttgcatttcttatagacaacaaacgataacattcatcaagattttaataccctgcaccctctctcctattcttttaagaattttataattttattttcactaaaattagattgttctgctgaccgtgcaaactgcaaagtacgggtaaattattctgttaaatacataaataattaacggaaaaaaataggaaagagtacacttttcattcatgctgcaacttatgtgttgagaaggggataaatcgaaaagatttatatcaatataatgaatgaatttgataacatactttaattcaaaatcttaaaatttagatttatagattttatttttacttatacatgatattggactttatctcatatttattctccaacaacaactttattgtattgttgaatttgattttaaacaatcaagttttgtttttggtggtgctaattaagatttcatttataaattattcttgtgtattttttcaaatgtagattttcgagccataaatacgatctatttttattttcttaatatgtgaaatttcttgatttttcttcaatagtatatataaccaatagtcaatatatgacaaaaaagattcttgaattagccataaggggggacttacctggcctgttatatatcttgcctcaatcatgataaaatacgattgtgatgttgtaaagtgatgtggcccaatcatgataaaatacaaattttttggcattcgttcgtatatgtgacatcgttgcaatattcgttatgacttatgagtgatgaagtcaattaaataagtaatcaatgaatttatgttaaacgaaatctacataaataattgatttagtttagtaacaggttaattcaatttgtgttctacattcatatggactacggtgttacaacttttctttttgttgttataaatttgtgcttgaatttatatattttcatgttaacaaatatcatattatatagagagagaggagtatataatatggtaatttcatagcacattcaaaacccaccttgtcaagtaagaagccaacaaaacaaacataactatattatgatttcgtgttttaaaatcaaatttaaaaaaatgtaaagagtctaataaaaatattggttatattaaaagtttagtccttacacacttaatattatttttcattttagtcttgacatgaaaatttacattttaatcctcacatgaaaataagtgtttaattcatatgtattatctgtaaaaaaaagttattctatcaatcaattagaaatcattttttatatgatttataagataataattaaaagttaattaattatcaaattatcgtatatgatagtttataattaatcaatcgtgtaaaaattctttgaacggtcaatatatacactattaattctaaaaaaattacaaacttttcttaacattatctatactctataataataataaattaaatattctccatttgttatccacctttcatttcattagatagttttaaaccatttcttaaactttcatttttttcctaacctatagtaactctcctcattacttctatattgttagttttttgtttattctgtcacgtttttaattatttgtatttaacttttattttttaattatcatttaaaaaatttagagacactgtttccctagttataatagtgttagagtatttttcctataaagattaaatggaaaaagtgtgttaagtatacgaaccaaaatgttaacaaagaaaagtttaaaaaaaatattcaaaatgaagtgtaaattcattcacatagtgactaaaatgaaaaatagtaactataaggacaaaatctaatatcattgtaacacgagaaggaccatttactcatgtaaataataaaatgtggaatgttttcttgtgaaaatcaaaacaaaaaatgatgtcaggtctacgggcttaatttttaatttaacttaaaactaagtatttataaaaattaaaattaaaaagttaattgtattaaacatttcatgtagtttgttttaattcacgtcataataacacaaaaaaagacatgacatcttagatagttgttatttatttatttatttattatattttatgataattactttcgaggagaaaaaaaaaaacagaaacctaattttttattttattttttggaataaaaaaaccttaattttgagcatgaactttcaaataggtcatatttacataaaagacgatatttatacaatttttcttacctctcctgcaactatagttaaattttttctattggtgggattgatttcttccttttgtgacatcagaatacaatataaataagataagtctttctaattataaattcttttaacagataagttgaattttcatgaggtttgattaaccccatgactttttgtatatcttttttttttttaatgatatttctttgatttgtattttctttctatcctaattaatgataccaagttagttggaattacttgtttcagactgactcagtattcaagcccatctttattaaaaaaaaataaaaattagcatgaacgattgaggttgacataataatcataagcagccgaaaaaaaaattaacccttgggcgtaatgtacggattgttgtcttgagcacagggctgcatatttacatatttgacctttccctacgttttggtgtctaaatacaactaagtataatttactaatttagtggaagcaatacatgtagagtcgtatatgagtacagcttcgtggataacatgcaaaaagtttcatatggcttaaaaattgaagtcaataaaagtttataaatagccttctcataattcactgaaaaataaaatagtgatggatcactgaacactaaaacagacaatgccaaaataaatcatcctaaccatactcaagaatttgagttcggatcaagggttaataggagtatattcctagcctccatcgaggggcaacgagaatatacggttgccatatgaacaccagcgtaagatgtgagaccttttctatgtcggttggacctacccaactgataggactgctcgcagtgtggttgctatccaattggattttggacttcataaaatgtcatgttgtggtttgttttgtttgctattcctgtattttcacataccttgcttcacagccacataataacaatttttactatataatcttttgtctcgtgagagactttaacatcttaagtgttagtaacagcacaacaaaacatttttccttagttgccacgcaatgtcaaacgatctagtggactactttaagtatagtgggaatttagtaactacatcggttattaatgaaaccacaataagacctagcatggtcacgtacctaattttctataaaacaaaactccagacaaagtatgaaaaaaaaattgtagtgttactgcaagtgctgtgctgtgacaatagtagtaatattttcagtccttcaaattttcaaatacccggaaaactatataatgaataaacttgtagtcctttacattaaaattactgctgaattcaatggaaattgatccctcactattcctacgcattggcagaaatacctttatagataacacgcaacacctaactgtttcatccaaaatttatacagtggatggaaagattcaaatcaacttcctttctctcaccagaagtagaaagaacggttgtagttgcaagaaaatataaaaaaagattcaacagtacaacgaacatttcatcatttgattgtgtcaactaatgtgtgaccccaagacagctctatttgaccaatcaataataggtggcactaccaagcaagggaattctttgactgctgcaattttaagttataggaattttctatctcctcctgcaatattcattatttaaaatagttatgataggtaaggtaatacttgaatactgaatctgtaataaggtatcagataattaagatcaacaccaatgttttaaagaatttgaattgtaataaagaaaaacatacacgtataaatgagaaacagaaaatgagtcattcctagtattctcatattacttctttcacatggaatagatttttccaaatgattcataataccagtatcaaggtttttacattgcataagttttttaatgcaattaaatgatgtttaagggaaaatttctaaactttaccaacatttatgaaatgatctttttaccttgcaggcttttagtaaaggctgtaagaatgacgatctgaaaagtgtaattgcatttccaagcgaagttctattgaattctgctatcaaacaaggcattaaaaatcactttcccttgtaatggaatccaagttgcaattagaattgaaggaacatatcaatgtacataaacaggatccccagagtccaagacacgtggtgatggcaatgtgaagattttataaaacaggaaaattggattgagtataaaattaacataccaccatcaacatcagctcttgagacttcataattaagctcttctatcagctgcaatgttacatacaactcacaatgtcaagattcacataaacaaaagagatgtccagaaattctcagaaagcagcatccttatgtgttttccttttcacacatgaaaatgtgttggagaagggagcaagtgtcttaatgcaagttccagatcagaagtagtaaatacaaaacatcactattgaaaactaagcaccgttttggaaagtttttctctccctggaatgcatatcagaaaactatcattgcagaataagtatacctgtgaaagggtgggtactgtagtaggatcaaactcctcgcaccgttttggatcaatagggacacaaactcggcctagaacaaagaataataccatgtaatgctaaacagtcaaatgagctaatggatctatcaatcaaatttaactgggagatagttttttagtttcaattttatagttaaaaaataaaaataaaaaatataaagataaaatcataaaaccatatgattataatgtcaccagtgaattctcaagcctcataaaaaattcaactggttatgtcaataaaaattgtgcataattatatactaacctgttttaggatgtacacagaatggtgctttaagcaaatgattcatgtgtttagaaacctaaaacatgaacagtcttaatgaacaaaattcagactaaacttaaaattagtcaaaaggtgttattggtcttctatagagacattgatgggaagtataatgactgcagaaatggtaatagcatgaaagataacagtggctatgggaaaaaggccagttaaaagatgaacctccatatctagcctgggataggtaaagcagaacacaatctcttcaatgcaccgacgcagcccttgtgcctacaaaaaggattagaaaacattaataataaatagcaatatcaaatgatacatgtttcagcaaatcttgcatcatttcctgtattgtcaccttgttctacatttcttaaaaggaagcttgaataccttatgttttccagattgcagcaactgtttgcactgttcccatcgaacaacattgatgtcttcttttgcactagaagaccgcctactatcttgccatcttcccctaagttcagaagcaatggctgcaaaagtaacccatgtattgcataagataatagcagggagtgaaagagcaaggttcatatgaagggaggacagaaaacaaagtacattcatcaggaatcatgtcaaggatcttctcatatctctcctcggtagcaagtaaattttgacctgtaagcagatttttctcaaaatagtccttgagaacattagtgtatgatgtcctggaaaaataaaatactgcttagcatatgaaataagagatctggttcagaaagttaatgattcatattaagacttacgccaagaaaggatgaagagcagcacccatcaaagaaaccttcttgtgactattttcattgccctggacagcatatgaaatcaacaaaaagtttatacaagtattgacaaacccacttgtcatcagtatactataccttgtagacacgaaaatagtcagcaatagcacctctttgctcatttgtcaacctgtatgagtgaaggcaacctatttgaatttatgactgtacagccacaagtagataaaggataacttttgattgtttactgtttagtgcctcaccttcttgcctttccatcacagacccaacaatgaacacctctgcgcccactatatacccagagaatgtgtttgaaaccaaagtcatctgaaacagaagccccagagcaaaagtcaacacaacagttacaaaaaatgcagacacccccccccctcttctcccaaaacaaataacacccatttgttttatgcaatcaccactagatgggctcaatcttgccatatacgaagctattaaatataattttaatgcatgttggatattctatatccctccctcccatagtattttgaccattttcatatatgaagagcatctcaatccaaaggccataaagaattaggacaaaaaaactcagtcattgaataaagattaagcacaataaaagatcagaaatgggaagaaaataaatgcagaagagatgcttgatgaacctcaaagcatgtaatacagtaataggtgtaattaaaatcaaacaacaccataccatacatatatcccagagtgaatgctaacttaagcattgagcctcctctaacaggtatattaggcattgttgaagccttatatttcccaggaataacaatgttcaggaagttatgttgaaataatgaaacatacaagatacaccctagactacaactattatcataaattttcaagtagaaatcatgtctctttctgcttcagcaaaaataaacctatcatggtgagagatgaccaaatccagtaaagtcactttcccctgctatgttatgaattgggagaatcatacttgttgtgaggcaaacttatgttattttaggaggattctgccaggtgacttacatcaactccatggtctttcaatgttatatgagatgtaccgctatcttattatttcaataattgttttttcaatgtaatgaacaatataaatgacaaaattgcaccacttctccaatatcatataagatgcaaaatactacctcttaaggcagtgtcaatcactttgatcgctatagtcatcaacggccagcaaaccaaacaaacatcagcacccgaacagcagtatctaacatcatcataatctgacatatcctatagaaacccaaaatacaaaagggtgtcaaatgtgaagaaggccacaatagctaaaggcttcacttaaagactgaagcaaaaaatcttactatatcaaaaatcaactccctctcaactggggcaaagacattattatcaccactctgtgcataggcattcctttttgcaggctgaaccaaatacaaggaacatattaataaagaaaagaaacgctggttgcattaatcattatagctgcatgaattataaaagacttgaagcataataatgaaatctaggtagagaggatttggataaaagtggacattttacatcaacagtgtagacaggtccaatatctatcttaacagggcacttttctttgatggagttttcgagctcgtgggcattgtggaaagattggaagcgcagatatatatcattctccagagtgaaggaaaactctcttcgcccaatgtaggattgatcacaaccagggtgcttcccatctaccaaggaccaaaaaagagatgaatttttgtgaagaacgaaaacaacaccctaacatccattaaagggacgactaaaatgacacgatttttttagagggactaaaaaacaaataacctcctatttgcaaggaataaatatatatttaatccttaaaattaaaattaagaatgcatcgccattcaacacccattggaagcatggatttggcgatattattaccgttgccataagacacccatctgaccaaatcagcaaaaggaaacagctttcctggagaaaacgaaaagaagagaatagaaaacgttgaaaagattaaaatccagtacgaaacaatgaaaatcatgctaatttggtacagagattaaaagaaaaagacgaaacgggaattgaaagtaacgaaccgtaatatagtttgaggtgattgagattgaaatcgggttcttgatgtgggatcatttgctttgcgaccgaaattatgaaccgaatcaatcggagaattgtgttcacgaagtgggaaacgaagaaatcgagagcgaagtgattggtgtgtgtgaatgagatggcgggaagatcaacatatatgtggcgggaaactgagacgctaatgggcctaagcctcttttgcccatttcacttgctttcagggcctaggcctctgttgcttcctgcacttccattattatttcttgcactttccattacattatggataactcattctaaaatgaaaaataatggaagtacaatgggaagtgtaggaaacaatagtggaaatgtaagaagttttaggcgatcacttgattgggcctccacattcagttcctctttccaagaaaaaaaatcaataattgaaggcgatgattcaattaacttaattgggtgaatttataattaaattatttttatagtatttatctataagtaatttataaaaaatactgtatttatattcaattcattcaacaagtaaatctgacttttcttatgtttgtatgttcatttaaagaaaaggtaataacattgacacattttttaatacattatcatttattagttgaaatttataaaaatttatatttttttgtgtttcacatcttatttaatgattctatttcatgattttataatttctaataaattttaactaatatgatacacaaataatgatcaagcaaagattatcaacacattaatcatttgtatttgtatttaatcacttagttaaaaaaaaacatgtaagtatttaaaaaatgaaaaaaaaaacaataaaaacattagaaattacaatcaaagcaaaaaagcaaccaagtatgaaataaattaataagactttttatgaacttcttgcaaactttagtgcaagttttttttgtttttttttttttgaagaacttgagtgcaagctcagccaacttttaatgtctcgtgcatattctttagctttatttagaaaagtgacgtatttgtgtcaattgtgtatggcttggaaaattatgcaagcaataccaagtgggattgttgcttgacatgctatttgcaatatctcattgtttgaagaatttagaattattcttgaacaaactaatgtaaaactcttaaaattatagataatataaaaggaaaaaaaaagtatatttatatataaaaaaaaatcattttatcaattcgattttttattcctttggcgactcttatccttctcccattatttatcgccctttctcgatttttgcttcttcttttttacatatttatttatgcacatacatgcttcaagtatttcttttgcttaaatatatattatatttttttagaaatgatatacactgacaataatttgtataacatcatttgttgtgtctatttatctccgactcatcacttattacattttaatttttttttgtttatctcttttggttgtacaaattgttgtacaatttattatacaagtatcattttctatttttttcgagttattattcatataaagaatatatcatacaattttttttatctttatttctataatcacaataattatgtttctattttttctcttctcatctctccttttgttgtataaaaattaattatccaatttttttaattcaattaatgaaaaagctataatgaaaaatactagttaattaggggtagcatgcgtagtggccttatccaaatgaattcacctggaatatattataacaatatatttcatgtgtgtgtactagatgacccgacaacttgggcaacaattactcgtaagtttcagtttttatttttctttgcattgagttacagtttgttattagttataactatatatttcaataatacaaataatttaaggaaacttgtattttattttattgactcaagaaacgcaagaagggaaaacagaaatgaaatgagaagccatagatacgtgaatcttcttaacgattccatgcaaactatgtgcattgaacagccatatcaaatgattaagggttcaccaaaccacaaaatgagggtgacatgaattggtgttctaaccgtcacacgaacaaacagaacagcaaataaataattaagttccataaggttttcaaagattgtgtaccaatggcatgtcattacattttgaataatttgctcaacctttacctaccttgtctggcttgaaggaaatggcaaaaacaataaatggaaaaaacagacgctagcttctcacttctcaagtacaaatcatcacaatattactatcataaatatggcttcatttaagttgaagtgacgaataactaatattttcagtcaaaacatataagtctactcatgcgtctagtgtttaatgtaaaagaagtaccatgcagagaaaatgattaaacaattacacttatagaatgagatatatactattatttaatttgaataatataatgcaaaagtcactgtagctcctgagatatatcagactgtgcagaaagtatgattttgccgaagggcctaattatctcaattaaacaattaatttcaaatgaatcacgggacttgcgataattacgtcacagacaacagattagttaagcaattaaaatcaaaccctataactgtcccacctatgatcagtaaatagccttgggaatgcaatgcatagagccgtagacaacaacataacaaaacagagtcaaagttaatacttagtctgccatgtccaaaatattttaattaatctttaaaaaatttattaattaaaaatttatttaattgtttgataaataaattattttaataattttttaatagtttttaatatttttaaatgttatttaaagtaaagttttttaaaatattaattctaacttataattttttatattttttatttttattttgaatatatttatccaatttttttattatctttctaaataagtcacatatttataagtcatatgttctttattttttaataattttatatttttcaattgtttcaacaaataattttatcgaatatttattatttaatatattaattttcaatttttaattatcaactttcaactatcaactatcttttcaactttttctttttatcttaatataaactttttccaataaaaggaaaaaatgctactaccattcaacatactttttcaaacaatctttgatatatacaatgtttcactaaataaaattgcacatatattttatctaacaataaaaaaaagttatatatatatatataaaagaattaaatcttactaacccgcgcgtccggaccggacacttactaaataataaaaaatatttttttaatatatatcacatattcatagagagagaaaaaacatgaaaaatataatatttcaattaaaaattattcttaattccttaaccaagacactactcagtactgtcatcaatgttctttcagaatatagaaataaaactagaactagtagtcaacgacagtttttattgataggaacaatttgactagggatgattgtgtaattggtttaaaaagtcaattgtttggatgatgtgggtgatctaacttgccattggactgtggcaagagaaaatggaacaagtattggatggaaatttatttgacgaagggcttttcaaagggatgatacacacatgccgatgtcatttaaaataggaagcacagtgtgtgtttgggccaatatttcaaacaaagactctctcttaagcggtcaccaacattttaacctacctactgtatttatgtcagcagtagccaagctaatattatctggcaacatgtagagggcacttgcatgaaagaaaaaatgctactattatggccaatgcttaaaaatggtatcaaaagaaaagaaaaaaaaagtggaaggtgaagttattgccagcggtgtggttaaccaaatgctaccatgaaaactttctcctgcacccttttaatgactctataaatattctctgcacactttgttcttcaccacagatagacacagtcccactcttcttattccatttactctcttgctccttctctttatcatcaccatcaaccaatttgaaagaaaaaaaaatagcatggtgttcccaatggtgcttctgaggcttgcagactgggtcttgtaccagcttcttgctaactcgtgttatagagcagcaagaaaaatgaagagttatggattccatttggggtatttgtcatctaaaccaccccttcaaccttcttctttccctagtgttaccaaatgtgatttggagggtagaagctcacaaacacttgttgcttgtgacattcatagagtccttttgaggtcccactccttctttccttatttcatgcttgttgcctttgaaggtggcagcattttaagggcactcctcttgctcttgtcttgtcctgtgttgtggattttagaccatgagttaagtcttagggtcatgaccttcatcaccttttgtgggctaagaacaagtgtcatggaaaatatgtcaagggctgttttgcccaagttttatttggagaatctcaaccttcatgcttatgaggttctggcctcagcagggtctaaagttgttttcactactgtgcctagagttatggtggaagggtttcttagggagtatttgagtgtcggtgctgttgttggcacagagttgcacactgttggttgctacttcagtggtttggtttctggttctggcttacttgtgaagcacagagcactgaaggaatattttggagacacaaagcctgatattggggttggaagctctagtgttcatgatcatctttttctctccctttgcaaggtaagtctctagttagctccactgtttaatcacctcactaactgtttaactcttgcgtgttcaatacttcattgttcttaaataacctttcactgtttccacaacaccaaggacctgagaccttgttacacgccttaataaaaaaaacaaaaccatttaaattgaaaaaacaaagactaatcaaagttgaaagttcaacatataaccttgtacgtattattctggtgaacagttttaattccctttatgatatgttctgttagcacagcatattataaatctattgcatttatatcaagattttaacctgcagtcattgtctcgattgtgtcacgatctttaatattgtaggaacttacgaacaaatgtaaccaatgttgttatagttttagttgacattgcggtcaaaattgcagtcacggataatttttttttttttaaatcttgatttagattgtaatttagtagacatgattttattaaatctattaatgtattgtgcctaattccagctacatgataatgacaggaagcatatgtggtgaacaatgaagagggcaagggcaacccaagttcagtgttgccaagggacaaatatccaaagcccttaatattccatgatggaagactagcattcctgcctactccctcagcaactctatatatgtttatgtggtttccattaggaattcttttagccatttatagaatccttttgggtattctacttccttatggatgggcaatggcattaggggtttggagtggtataaatctgcaagtcaaaggcaatgtccctgatgaaaagtcagagcaaaacaaaggggtcctatttgtatgctcccacaggactctccttgatcctgttttcctaagcacatgtttggcaaagcctttgactgcagtcacatacagcctaagcaaagtgtctgagttgatagcccctattaggacagtgagactaacaagggacagaagaaaagatggtgaaaccatgcaaaggctcctcaaagaaggtgatttagtggtgtgtcctgaaggaacaacttgtagggaaccatatttactaaggttcagctcactgtttgctgaattggctgatgagattgttcctgtggctattaatagtcatgtgagcatgttctatgggacaacagcaagcggtttgaaatgcttggaccctattttctttctcatgaatccaaggcctagctattatattgaggttcttggaaaggttcccaaggaactaacatgtgctggaggaaggtcaagctgtgaagtggcaaactatatacagcaacagttggcttgtgctttgggatttgagtgcaccacacttactaggagggataagtacatgatgctggcagggaatgaagggattgtgcaagaagacaagtggagaaaatactattgatagatatgaaaaaaatatatgggattttcacttttcaatgatattttgaaatgtcatattgtattatacacttatttttatgttgccttattttgtgcttctttcttcttcttttttttttttttgttcttgttggatatgacatttatgattgtgatattaacggaatgacagtgtcaagcaagcatatttactttacgtacactgtgcttctttaaagtaactaggacttgactaggaatatgaggttacataacttacaccaaatttgtatttcacttttttgtaagagttttttttttttaataaaaaaattgtctcttatattaattaatatttttatcaaaataaatttaattcgttaataaataaaaaatgttgtaaattgtttcttcttttcacttgtgaatattggagaagataattctataaccactattttctttatacattaattaattagatgtaatgaacaaagaaaaaaaatgaaatgattagttaccataaaataattttataaagatgctataattattagtaaatttaatgtcattgaattaactactttttttttaattcttataaattagttagaagagttttacagggacaaagatagtattaacagaaattgtacatcttaaaaaatgttcagcctgtgtacttatatcaaggaacgtgtctattctgacggatatagtaagtaaaatacaataaataacaacaaattagagaatcatgcaaggcaaggtataataagaataagaggagcacttcaagtcatgtctattgtatgtctgagtgaataaaataaatcaatactttgctcatgtgtatattttttaatctttaagtgattattttaaactaagataaagttcttcccccccttttatcattatcatgacgaaaaacacaaacaaatatatgcatatgatgttgacaggtagatagacacattaattttattgattcaaggaattaatgtgtcatgggaaagatttatctaattaaccttgtctgttgcaatgtgacaaatttggataggggtttaatatgttgacacgttaattttcaccgcatactttttgtgggcagacttttaattttttgtcgatacgaatttagttaatttaactacgctaaaatctaatattcattaaatgatattgtatgcactttaatattactatatgataaatattgcaaaaaaaaaaatacattgacaaataatcaaaattaattgctagtacttaatatctctttgtaaacaaattgattaattaactcatcatatttttttcatgacataaattaaattgaaaaagtaaaaaaaaaaaaaaggttttagcaatatgatgaagaaatgttaataaaatagaagaatttagaatttagccttggtaagatatttttgttatcctattattatcattaggcatattcaagcaatattgcactagggtcaggggaactaccaactaaactaacaagactacaccaacccctttgctcaagactttaaatatgaagacacgttgcttctatgggccaaactgaatcaatgttttagtcaaagtcaagactgtacttgggcataaagatcttacaaaaccatggaacagccacatattttatgatagttataaattttgtttattgagtcattttttactatgaaatttaaaataattctgcattttgttctataaagttattataaaaggaacttatttaccaatttttaatatcactctccaaaaaacttataaggttagacaaacgtaaatgagtattaatgttacaagaaatagtaaaacattcttataacactctttgttgttgggtatgtgactatgtgagtttattaaatggaatgtcggttcatcagatttagacatttaacaaaactcacgtataagttatgaaatatttgtacaaaaatattttgcactaactataaataattaaactcaaataaaaataaataaataataaagagttttatacacatgcacacatatttgtctttttcccatttatgaaattagttttctgctattagctagttagtagatcaaataattaaatgtatgtttaactgtcaagtagtctattatatcattttgggtgtggttgagccgttgagggacaataataagaataagaggcccagttaacaatgaatatatttaaaaagtagtctattatagtattgacaataatttcatgcctataaaaattgttaaaagcatcattttgttaaattaaatttaacaatgcattaaacttttggtcataaaatgacacaatcatgaatccacagttcttttttttttttttttgtaaaaaagaggcccagttgagaatagcgaagtccactccgagttttagccattgaacaatttcgaaccgtttaccgttttttgtttggataaaggaaccgtttactgtttgatacgcaactgcagagaactatcaaacaaaagagagataccagcaaaaggatccatgatattattttctttaaaattaattactatttaaatttaactagatgcactcatattgttaaaaaaaatatactatcatttaattataatttgatatgtatgataaattgtttgaattttataattattactttaaaagtcacacttaaaataatttctaattgattgataatatatatatatatataaatataataaatatgagaattataaagaaaaatgatagatacatcatacatgttagaaatctcataatattttcacgtataaaagaaacaagatattttgagttggatatagtatacatgataaatttactataaacaaataaaagaattagtgatcaaatttaaaggcgaaaattattttttttatcattaatcgccacaaaaattttagtgatagtttttaaaaaaaatatatttaattttcccactaattttaatttttcttatagtacattttcttaacttgtcatttccttgcgtgttactccttcagtgtagttatcattttttttcaattacatgaatttaatagtacttctaaattactcttatttgtcgattaagtaactgcttgctctaaagtaacaaaattcattttcatgcttttttttaataaaaaaatacacgttctaatgtaagcgtgtgatttaaattaatttagacacacatattaatcacatttaaccattaacagcccaagctcgattccatgaaaaataattctatcaaaattcaaaaccatactaacaaattaagagttaatgtctgtaatagaagacacttctaaagttcgagacaaaacaaaagacacttttaatatgagttaggttttaaaataagttaagatgaatttacactccattttatttaaaaaagtaaattatctttactttcaaaaacaaacttaattttacaaaagttattttaaaaaataattcatataaacttagttttttttttatgatgattagttttcttttaaaataagttaagatgtgaatttaaaggtcactatatattatacatttattcaatgagttttactaactgatgtcttaaagacattagttaagaattaaaagaggatatttattgtttattatataaatcataaaaaataaaataaaaattatggacagtataattatttatttctcaataaaaatatttttattttaaatttcttaaccagtgttgttaatgaaatgattagtatttaccttattgatttactccaagcataataggtggtgagtgacatgttcctagaatgttcctagaaggtagttcaggttattacttgtgaggggtaaagaagggtgttggttgtatagtgactgaaaaaggtaacgctaaacctgttgtaggtgacattgggactgtttattctcttcctgttttgcatagttgaagttgtgagaatttatgagtaagggacctgtgccttcagtacatgccatgtaaacaaactccaatggtcataatcaaaagatggtacccaccactatacatattttgtaatgccaacatattgatcttaattacacgttggaaaaaaataaacatctaagaaattatattttaaatcaacatgtatacattatattgcaaattgtgcaacaacaattattttattggttcaaattgttctataatgatattttatataaagcaaaacgtaaagaaaaattgtttgtatgagttggtcacttatatatgtaagaaatttacatctttttagtgtaatccattctgtttgttaaaaattagattagatgtagatccttagcttagacaacaaaactgatcctggtttatataactaaaaagataaggtcataaggcaacttcaaagatatatttatttttctaagttctaacaattctaacgtaaaaaaatgagcaacacaaaaaaaataaaaaagttatgtacagtatatatctctacatatgtccatcatcttaaattgccttttctttctaccatgtgtttctaccatttatgtgctgttgatggtcatgtagctattggcttttatgtctcccaaaaagtctgtaaaaggggcaaaaattatttgctcagaacagcaacatccaactctcaaccattttagagataatttctttgcaaagttgaaattatccacagaacgacacaaatatctgcaaagctatttaatgtgtcaggtgcagcagcagcatagggagagggttctgtaggcactggcactgaaccaaaaacgttggcaccgcttgagtttgttgtgttcaacactgatgtactagtgctgcaattttaggtaccaactattaagttaattaatatgatattttctgttccaattgttgcaacatagtaacaaataaagcatagtatatgtatattaaaaaaaatgaaaccatatatatggcaagattgggtcacctagttgatggatattgacatgccccagagcctgcaaaacacgtaaatgcattcatcaaatgttctcaacaaccaaaaattaaataatattggaggaccatagtgttctatgctgaaaaataaaacaaaaatgtacatcaaattttaatgtatatgttctgtaaaagataaagataataaaaaacttttcacaacatcattaatattagattcttaattgagatcttagatcactttttaatatcatgttaaaagtaaaattgaagatttctcaagatattatagatctcattttgaaatattaggggaaaagaggaaaaaaatattcttttttgaacaatattcttttattgacaatattcaaaatttttattcaagatcttacacaaaatatttttatattcgaaaaaaattgttataaaaatcgtcacttaataggtgagaatgaatattacaaatttataattggttaaataagcaagacattcaattaagagaaaaagaaactaaaataagtgtatatatatgtcattatttttttgaaaaatttttttcataattttttaagttaaaatctttaaaaaataattattatccgtaaataatcctaaccactaagttcataaattttgtacaaagcattatgttacttcattttgaatttaagtggctaatattatttttctctgtataattcgtaagcaaggtatgtaagcacaattaatgaaaaaaattgcgatgaatagctacttatagatactatttgtgataataggtatttaactcttttgtattttttcttaatttacaaaataaataatagtccttaacattaataaataatattaaatataaaatattatataaaatataaaatatataaaataaaactaaaaaatatacattaaataattaaaataaaaaattacttataattaagaaaagtacaaaaaaagaatttgaagacataaaataatttactacactaatgaaaaaagaaaaaagttattttacaactttaaaattggctgagtgaaaaaaaatcttactactttaagatgtgttcaaaataataaaaaatatttgttttatgattttcatgtaaaaaagaaataataacatatgttataatttttaattcaaaaataataaattacctacaatttacctattttaaaatattaatttttaaattttatcttcaaatgataaatttgaaaaaaaattaccccaattggccaataaaggaagctttttggagatgctgcttccaaaaaagttgaataaaagtttgacttttgcatcacgcagatgtcagctttgtagctcctgcatccccaaccccaagtgacaggctataatcaattcaaatatgcaataaaagtttcttccttttgtagtcttttcagaatggaaggaacccaacaatcatgcgcagggatgcgtctgattaccaacccaagggacccaacctctctttggcacaccagagatttaaaactcaaatcgacccgataagttgaatcacgattcgataattgaataggattgactcataagttcaattggttacattttttaacccaaaagcctcggtcggaattttggttgaacggtgacccgtcgatccagagatggtcacttatttttttttttttgttataatcaaaatgagttaatttaaatttaaacccattttaattttaaaaactttatcgacctatcatttttcttctcgtagtctcattcagtgtgttcgacaacctctcattcttttctctcatttgtaagttctccagttgcaagtgagtccaactaaatttattttttctttttcattttattttattttagtttgtgtgtgtaattttgaattaaattgatcttttcatttattgttgagcctttcttgtggtcgtaattgcattttttgctaagttaaattgatttaaacgtgaccacaattgtgtttgagtttcaagtgaaattgtggtatcggatcattttttaaaattgtgatttgaaactttagattgaacttttatattttataatctacattgatgtgatatgactatatttcattttagtgtgaatattaatatatattgtcgttgatgttaaatgttagagataatagtcattttttaacttttattctttatattttatttgtgtttttaatactttttaatttcaatgtatttcaggagaaagattttaagatagatataaaaattttatattttttattacagatcgagtcatgcggatcaattagtgactcaccaattcgaccactgatctaatgacccaataccatgacttagtcacctaacccattttaaaactatgtgacacacatcttctgctagtttgcatactcctttccttttataattatattttcatcatctactaaacttcaacttctattttctaagtttaatttttttagttttacaaattttgttattttattttttgtttatttgtgaatttgatctctatttttaattatgcattaatttatatgtcaacttataatctaatatttaatataaatactaatataataatatagtaatagaatattatgtcaatatgaaaatattaatgtgataatgcattatagtgacatgttaacatttctattaaatatcatatattagtaagtaaacagataaatcaaaatggcacaactaaaataatggactcaaatttggaaggaaaaaaatattgaaagatgttgtgaaattgaaaaggtaaggaaaaaatttgtaatcaagcctaatttttgcttgaattttcaatatacccaacgacttgaccatacctttggacttgccttaaaattaaaatacatgtgacgttattgaaaaagttgcaacgagaattataatagcaaaggccttacttgggttagtgctaatgatgacagcagttccaccaaaattgcagctatttggaacaggattcttttgataatacttattgaaggcataagaagcatggtccctgatggaatgtgggttgtaacagcttccaccaggttgtattgctgagcaatcagcaccaccatagccacaagcatagtccaatgcaacttgtagagtagtctgtgaggcagttgggcttgcaatgcaccagcttgcacctgaggagattggagaattcacagtggttggagtggtaaatgggattgtggaggctggagagactgtgtctggattgaaattaggattggaattaggattcaggaatggagatgttgaaatggtgggagtggtgggaactaagtttggaatggtggtgatgggagtggtaatatccctttggactgtagaaattgaggcagtgaattcttgtttcccttgatcatgtcccagtacattcacatatacaggtacttccttttgtgtcctacttgaacctatgtttgaaataacaactgaattactttgttctgtactatatgtccaaagcatgtgaagagagaaatcaaaatatggatttgaaatcaatccaagccttttcctttttcaaagggatgcaaaaaaagtgtaactggattcaaattgtgcctataaggctataacattcatgctggtatggaaaacaaaatctgttttgctattcattggaatagttgtagaaattttgattcaaactaattattatatttatgcccttaagacttagacctctccattatttcaaaaggcaacaacttggaatagtgcaactagaagggcagtcagttaaggacaggtagggtatactatgtagagagaggcatatgtgaatcaaagcagttgggccctttgtatcttttcaagaaacggtggaattgcagaaaggttggatgcaactgtactatgtgaaaccccagaaaaattagcaagaaaaggacttgtttaaacttttctatggtgtggctctataattgctggaacaagtatttaatggaataatacaagagacagtattttgatctaggaaacttattatccataaacaagaaaaagtgaaaagctcaattagtaaactatattccaacagaaagaagccaagatggactagcaaactaaaaaaaagaagtgattttctcctaatcagtccaaaatttatatccataatggtactagttgaactaaaaaactagaagagaataaaacaattgagatgccaaacttgagagaaggaaaaagctttttgtggtttcagaattcaaaacaaattcaaggggtccaaaacaatataaattaaagagaaaaacacagaatatgtgcaggagataaagaataagcaattggaaatttgaaaaagaaggaaaacgagaaccaaagacactgagaattaagaaacaatatcagaatagagccatcagagctaaaccaaagataaaaaagaagaagaaggaagatagaagaactatagaataaactagacaaaggggattacctgaacagaggaaatgacacattaagagaaatattacatagtaaaatacactcctttccatctttaatcttagtattcagcttcttcttctttgacacttgcttgtcctctctcacttcttttttaatgtggttccccagtaatagtagtttttcctttgactaaatggagaaaggaagatatgatgaactagagacggaaaaaaaggaagatggttgttttgtgggttaatcatgcaactaaaagtatatatagtggtagtggaagactgtgaggttgtgagagacaaaggagagggtttaagaaagcgaaaatggggtgtggtgagggagagtgttggagggtgcaagcaactgaagcaagagaaggagcaaaaaggagggaaaaggtggggaagaaggttgaaaacgaagtaaagaaagaattgtttggaatatagactcggtttgtgggcttgtaagtgatgattgtaatgatggtgctgatgtgtacaatttgcctttctctttactatttttctgcttttactgttgtctatgacttattctatttcttcttcttctcttgttttttctcctttattcttagtaggatctaaatctaaactataaaatgtcttgcattatgttagtactttgttgtggaagtataaaattataagttttgttggatataagattagaagtgtttatgagaatttctctactggaaaaagttttatatttctattaaaaaaactttcaaaaatactcatgacttgtattcaaatagaccatatgtaaagttcaagttgctagtggcttatttacattttgtcaattggagaaaagagacattgtggagagcatttggtatgatagaagttttttgtttttttagaaatcatatgttaagaaatttaagaggcattgatagggataagttttgagtttctaggaatcttgattaggaattttaattttggataagttttgagtttctagggaatcttgattatgaattttaatttttcatggttgatcatcgttttaaaaaaataaatttataaaaaataatatttcagaaatatttttttaacatgtttttctacgaaaactttctcatgagagatgtgagaatacttttttgagattaattttttttattacaataaaaatattacctttttttttaagtcctatgacacttacataaatttctgatgaccaatcaaacaaacaaattttactcattttatggaaacaagattttcgagcatgaaattttttttcttctaccaaaagcctccttagttttccacgtgtggtatgcattttaaaaaataacattcatgaggaatgatgtttcccaagaatattttttaatcagttttttcacaaaaacttttccatagaaaaggtggaaatcttaggtgatacttggtatgaattttattttcagttttcattttcaaatttacataaaatctaaaatcttttattacttaaaataatatacattagccaaaaaaacttctccccaaaactaaagttattttttgtaattatacaattaattcggaaaataatttattgtcaagaattaatgattcaattatttaaaatacaaacaatcataattgattttttttatttgattgacaccaatcttagaattgaacggtcatttaatttaaaatattaatgataatatgataatgtagaatttatttacgattgataaccatccaatccttatatgttatatcatgaaaatcatagcctattattattacagtattttcgggttttgattaaaggttacatgaatttatttataacttatttttattttaaaaatacttagtatgttataaagtgctaaatgaaagatagtaagtgacatattagaggatgatcaaatgcaattgagtctcaacttattatttttttagtcaattttttcttatacaaatatcacattttctttttagtgttgaaaatggtaaaatggaaagatatttcacatactactagataaaatgtcatagacatgctaggactgttaattgagggttattacctaaaggaatattgtacatgctagatcctcaagtaattctattaggttgcaactactcagttacaagatgtcaagggatctctttgaagaaggatgcccaccaaccagagaaagtgacatcaaggagattcaaacccacacccatgaaaaatataaaagttcaatctggattgttaaccactctgccaacccgcattggccacaaatatcacaatttaactataaggttaaatactttgacatgtaattcatttggagcttaatggtaaaaacaacttgaaaaaggctaaatagcctacaaaagaacctcgaagaaaaaaatgcatgataatagaattcagacattagaaaaatactatttttttaatagtagtaattagagtttttgtctttggctgaaacctcagtatttttacaaattttgaatctttaagctaattataggactaatttttgattcaaacatagtgatatttaaagttattcatattttttcaatgatgtattctgtaagatcaaactcatatctttttacacaaactcattacattcatttgaataggaaaatactataaaataatgttgtaaaaatattagaaaataaaactaaagaaaaaaaatagataaagtcataaagacactcttttaaagtaaaacacaactaatctaataattttgaaatagataaagacactcttttatattatttgacttttttggacaaacaaatttgttaaatatttttcctttctttttttggctttaaactattgaatattaaaacattcatatttttataatcatgtattgattcctgaattatttaaaagaatccactaaaataaaaaacattttataattttttttctaatttgataaagaggggataacttttttcttagatatttagtagtcccacagtttgcagatttatatctagttagttatgaatttccagctcaaaagggaagtgtagagtccactcatcatctatctttccttagtcccgaccacacacaatgacaatgtcaactctttgttctgcacttcctccattatcatcatcatcatcatcaccctccatagcaaagttcatctccgaccaaccatgcctcaccatgctccaaacccaatgctccaacatgaaagaccttcaaaagatccatgtccacatcatcaaaaccggccttgctcaccacaccgttgctgctagccgcgtcctcactttctgcgcctcttcatccggtgacatcaactatgcctacttgctcttcaccaccattccaagcccaaacctttattgctggaacaccatcatcagaggcttctctcggagctcaaccccacatcttgcaatatctctttttgttgatatgttgtgttcttcagttcagccacaacgcttgacttacccttctgttttcaaggcttatgctcaactgggtgctagctatgatggagctcagcttcatgggagggttgttaagttgggtcttgagaaggaccagtttattcaaaatactatcatttacatgtatgctaatagtgggttattgagtgaggctaggagagtgtttgatgaacttctggaacttgatttggtggcttgcaattctatgattatgggccttgctaagtgtggggaggttgataagtctaggaggttgtttgataacatgcctacaagaaccagagttacttggaattctatgattagtggttatgttaggaataagaggctgatggaggcattggagcttttccgcaagatgcagggagaaagggttgagcctagtgaatttacaatggtgagcttgttaagtgcttgtgcccatttaggagcacttaaacatggggagtgggttcatgattatgtaaaaaggggtcattttgagttgaatgtcattgttctcacagcaattattgacatgtactgcaagtgtggagctattgtaaaggctattgaagtgtttgaggcatcacccacaagaggattatcatgttggaactccattataataggacttgccatgaatggttatgagagaaaagcaattgagtacttctctaagcttgaagcctcagatttaaagccagaccatgtaagtttcattggtgttttaactgcttgtaaatatataggagcaataggaaaagcaagggactattttgcactgatgatggataagtatgagattgagccatcgataaaacactacacttgcatggttgaagtgctaggtcaagctgcgctactagaagaagccgaacaactaataaagggtatgcctctaaaggcagattttattatatggggggctttgctttcatcttgtaggaagcatgggaatgtagaaattgcgaaacgagctgcacaaagagtctgtgagttaaatccaagtgatgccagtggttatttacttatgtctaatgttcaggctgcatccaaccaatttgaagaggcaatggagcaaagaattttgatgagagaaagattggcagagaaggaaccaggatgcagttcaatagaactatatggagaggttcatgagttcttggctggggggaggctacatcctaaagctcgagagatttactctttactgaatgactccagttttgtacttcaagattgattatctccgaagggatgaactcgtgaaatttaaaaatcaatctgtatgtaaggaagtagctttaatacagagaagagttacaatatatgaggatctaacaatcgaaccatatatccaatttgtttgtcaatacactgggatttttagtttaattagggaaaaaaagttcctaaagtagaaagagtaagataggggcacagggccatgacatgaaattcaaatatgcaaaaatccatttcattatgttatattttgtcttcccaaattattccagtcatattggtaacataattagaaaacctggtgtctatttaagcttgtataaatttgaatctaggtcagtctgcagggctaaaccatgcataaggtcactcaaactcttgctttaggcctccagaaaaaagctatttagtattgatatttatacaacctttactattagctggtttagtgttgtgataactaaagtttgcttttttgctagtgaatgtaattcaaaccttgctagacttaccaatctcaacttctgtgcttcatgcatgtttgctttgaagttctaacacaaactgctgcgatatgcaatattaactctgaaaagtagatcttattgtattgaaaatcattacacccattaatttgctaaaataattcttaatacatcagaataagcatatcatcttgttttgcaatgtcaaccttggaagacccctgatagctacagtacagtacattttgtgaatgtgagacaacaactaacaaatagtagtttcaggtttttgagaagttcctccctggtgcccaagagtatatctctgggggcattgtaccattcatgagcaggttctgtggcattgcatacaagtcagaaatatcaagatggtgagtgcgtccattttggtaatgctgattctgcattgcagaagcaagttcatcatcttccaatggaaggcgatcgaaagtagcatgcatgaatgatgcagccatgattacaagagggcctgaagcaatcaaagcaccaaccacagcacctcccacaacttgcccttgagcacctgccaagtaaattgtgaggcctgtgatccctggaggggctggtgggggaaggattgaccccagcagtgaaagaatctcgaatcgaccgtgaagggtcacaatggcaccagctgagcctggttggcgcaatgttacatttgttacacagcctgttgcattgagtatgtaaaggccacgttgctttctccttgcaaagttcaacaaactttcattcacatcacagcctgagctcacttccatggcatgagccttcagtgcattagcactatctctggtgacaattattggtggcttaggtttgtttttggagccggccggccggccacgtggtcgccttaaggtgtccccttctgctgccgaggaaactggtgaaactgcttttgggactttgggagatattagagctacatcaatgccagacatgtttgagtttcccttgtcttgttcttgctttctatccatttcaccaaacataagacactttgaggaaaatgtgcagtaacaaagagcaaatcgctcttttctgcttcatagaattgcttaagtagttgaattgtgacaataaattttataggatcccaaaagaatgattattttgtaggatggagttaagtaatgccaaccaaccacaaattattgttttttgcattactcagcctaactctgcctaacttggctcatgtcaattgccttctccaacagatatctcatggcatataattattacgctttacttcgcaatattagccacctacacctcctttctcacattataataatatagaattgcatgcccttttgttccaaacatgatatgcgtgttcagttctgtctgatgcatctacaattgaacgctcacgcacatatgaatgacaaaaatactctatttcactccctcgtgacaaaaaagaagtcaactgtagagaaagaagagcaaggaagagggaaagagaggggaatttgaagagaacattgagtgtgtaattctgttcggcccagtaacactgcaattattctgttagctctgcaactaacactgcaaacagtttttgccgcataagcaattgtcaactaattataaaaaatgacagtgaagagtgatatgtggaaaatactaagctgctagtgatttcttgaccagttttgatgctcaatgttcttgcactgtaccattcttccactagggaactttggattaatgaacttatttgtgcttttgagttcatgaggggacagagaggaagcgtgaccaagaagaatggcttccaaggcaatcaagttcttcctggcctctgttggatgacaagtcttgaaattctcctttctgctcgaggtcttgttctgtgtctgctgagtcctgagatttaaagaactttgctggataatgcattgaaggacaggttgaggaaccggagggaggtgaagaggcggtgaatcatgcaaactaccggctttcaccaagacctaaggaggtctcgaggctcaaaaaagcgcttacaaagatgcttatagattatctctcaccaaagttttcacatcgacaatagaatgaacttatatatccttaaggaatatgaactcagttcttaccaactgtactaacctttgttggcatttccaacatgtttggagcctttgtttcacagtgtctctagcaaactctgagcctttttatgttatgcataactgtagagaagactgggagaatagaaggctctcgtgcttttggaatcttgacatgatccatgtctggtcttgtattccacagtcttaccatgttactgtttgtttactgttttccagcaactgagctcattggtcaatggtcatattgtttgcctaaatgctcctgtagcaacaaatgtggtctaagcatactaaacaaattattggtgcattgcacaaatatttccaaagtataagtatttttttttttacattaaaacatgtaaggaaaatatcatgttactaaatatgataaatttacacatatgaagaaaaaaatattaaaaatgcctttagtattaaaataggcactttattttattaatatatagtaaataaattaaagatataagattactaaaactgtggaaggaattatggaaataaattatttgaaacaagatatattatctttgtgtatgtttaatgtgatatataaaaattaaatttaaattaaattttaataagatgacaatactcttagaaaaaataaatctcatcaatttgatatattgtaactagattgtagttttaaaatgcaagtcaaatttttaaatcaaaactaattaattaaattaagtaaaactatttcaaataaactataaatttgtagatgtcatctcatcttttagaaaaactatattagtgaatatctaaaaattagttaatgaagaacttatttttgtttatgatcattttttttcttattttcttcttttagaaatacttttaaagaagcttatacaaataagtctttagttgattcttataatttttatgtagatgaatccaatgaaatacactttacacattgaaataattataaaaaaaatcaaaatcatgtctagaaatagaaaacataaatattttaaaagggttaagatgtcattaattaaataagagactgttcttataattagtaagttattaaaaactaaattattcattttcaatattgaaacatattttcaatagttaggctctgcaactagtaaaaatgaaagaaatatagaaaaaagataatacgtagaaagtaagctgctgtcagtggtagtttgttggccaatttcgatgtaatccgtcggatgacaaatcttgaaaatctccttgctgccaagttcttcttggatgtatagggtctgagaaggtaaaggtacaagacttgtataatgtgtagtagtcagaaccagattatttgtaggactttctgaagtcagaatatgagaatgcacaacacttggtggtggagaaggagccagaatgtgagattgtacaagtgtatacggtgagggagccaaaatctgatgagaatgtgatgataaagacaaagatcttggtccagctccatgacccaataaaggaaacataccttgctaatattaatgagaataaagatctagttagtattagtagagcagaatcatgaaataatacaacgcctaaaccattaaagtagagcttatgataaaatcttattgaagtcacttgaagaaatacacgcatggattattggacatcaaggaagacacgatgagataaaggtcaagctttaaatacaattgataacttggtatttcataccaaaatatcttgtatttaaaagtggatgatcacgaatctagatcaatctgataactcgatgaaacccaaactaattcaacaaaaaagtttgaatggttcggatcattgataaaaattaaattgaaaaattattgatccgattaattccgatggaatcttaaattttaattttcagaatctgatctaatttatatctgattcaccaaattaattacttattatatttaatttttatatattttttaacttttagagtttaaactttttagtccactccaacttttttaaccctaattcaatatgaaacaatattttatgtctttagaataatcaaataaaaaataataatcaaaccacaatcttaaaaaaaagaagaaaaaaaccaggtaactatataagtttttaattaattaagagtgacatttctctttgtcaagctaaattttttcaaaatataacctatgtaattaccaaaatttggaaccgatctaacattagagttaataattatcagtattgattctagtgatgagtgttgattccagtgatctttgtgatactgaatccgctagtatcctctacttgaggaatgacaaaagatacctgcaaaaggaattctatactcaagtgagtgtttgagggaatagtatattagaacagttcaattaaagtaaatataagacctgattatttataatgatgggtgaaaatcctatattgttaacttagaggttgttacaatagcataacaacgactttagtaaggtgtaaccgcattacaacttcgtaacagaggaactgcctaggattggccatatggagaacatccatgctcgtggcccaagaatgattaagatggacggctgacaagaaatactcattatcgtattactcgccacgtcaatcgtagactccagacattacaacccttttattttcaaaacaaaaaattcctttttcaagaaataaaaatcacacgagattcttaactagaaatatacatccattttcttaaataaatagataaagtttcttcctcattctttttacaaacaaaaacaaggaagtaaaataaaatcataattattttacgcatttggttaagagtaactattcttttaaaacgtacataataggatattatcacttttccttgtgtatttagctcctaaatccaaacttcttttctgaaaacattttctttttcttttaaaaaggggtttcatcaatgttatttctaaattaaataaattttggtgatgagtctcatttgttattaactcattttaaagtttttgttcgcctccgtcatattcctgattatgataaataattttttttttaaaaacctaataccctattgttgacaagaaatttttgcaattttcatcgaaaacttagattttaaatctagacaaagatcattcaaaaaagaaatctagatagctagagagaagagaatcacatcctggatctatttgcttttagcattcaaattaacgttgtacgggatgaatgccagcaagtcgatcggattgaagttaccaagtctaatccatcacaaaagcattcaaatatgtcaacaatttcatgctcctcgtaaagagttttcagttgtcagagaaagaaggatataatcatgaacccaggaaatcttgcttgccatccatttcttttgatttttttggtcaacacaacatatatattaaaagaaaattaactttgttataatgtaagattatttaaataatccataaataaagaaatatcatataatcataataacaaatattcacttttattattattatttttttaacataagtgaacagatataatttattgataatttaaaactatatatttaataaaatctaatgtagtattattatttgagcttaattaactcaggtagttaaactaaaaattccagcttgtaataaaatcctgtggtccgtggtcaggcggagtcaagtcaagggaaaggcaaagcaatgatgctaatgctacaacctctattttagttttcttttctctttatttctaatatatatgaatactttatattctactttgtaccaaaaattactttatacttgactaataaaaatatatttgtttgtcaaatttatatttattgataatggataaaattgcgccgaatgatataaattaccatcatcatactctaatatgctatcacgtaaataaaaatctcgctaaccattatatgctttaaaatactttatcatttatttttgtttaattaattataaaaatctaaaaaaactcgatgagaaatgaaatcaacagctaatgtatatttaaaactcccacatcaaatattcttaaagaattatattggacaccactaattaaaatatagtataacatcatgaactatgtttttttttttttttttcatttttgtcaataaattcatgaatcctaattacttaaaaatgaatacaagaataaaaagatgttgatcctccttttatcgacgttcctttcagcttggtttggtggggacatttaggatgtgctctgattgttgaatgggcggtgctctgattgttgggtttgcatttttgcacccaccaaacagaagaaaagtctttggtttaccaacttttcttctcagagatattagatatatgggaattgggaatgggaggtcttactttgagaaggagcagacatatatattattcagtaaccctatctgttatttttaagggatcattcaccggtttgtctccaaaaggggaccttttcaattaaaaagaggtctcaactctcatgtttaatttgctattaaatattattgtaaatttgtaacaaacagctttagctttaagttgagggtctggtcattagtgaacatcccaggattcaatcgaggtttttgttttcagcttactatacatgaaggaatgaatgtcagaaagtttaattatatattcaacgatcgaatttcacttctttacctgtaaaaagctaaaacttgttatgctattttttttttccgattatattttgctacactgtcacttgttaacagtttaagtagttataagtattgtatatggtaatcttcaaataaagttatgaattcttgttttgtaaaaatatttgcttttaaatgagtctatcatattttaatcagattaactaacttatattcaaatactatatcataatcaaaatctaattaataatttatttttttagtttaagttatatgtattgcaacatatttttacacaataggaatttacccaatcatcgcatatattaattaaaagaatggtgtggtggttaaattaacgctaacaatagatataaattaaattatttatatattttctttaaaaacttaagcaaataaagaaatagtgagtccttttgacatcaatacactgcctagctactttataacgacaagacaaaataagatttgcaccaatataggcttgataataaactttacagtctatatcttatacggtgcagattgtcaatatatattattatctaaaaaaatactattttagagtctcctagtctacactaaagtggggggaaaaaagtctttaatttctaatgtgaattgaaaaagaaaaaggaaataaaaaaaggtagccatgtacaaaaaatctcagactaaaattaaattaaaggcgttttctactattttatcatatatcctagaaatcattcgatgctagatatcttttccatcgtaaattcgggttaggagacacttgaaggggcaatatattattatctaagtgctaattgagttatggaagagtgtgaatgaataacaaaatataaagagctagatgacctaaataacatagtaaggatctaattatttcgacaaatggtagactttgattcgtcttatgagacgcctgaagttaattaataattcattaacagattgatctcctctttacctcgatctattcttcagattgaattttttgacttgtacatctaattaattaaaagaggacaggaaactttatatatggagctaaagtctaaaagttcataataaaacaaacttaatgcttacacacacattgatatgcttcatgtatataaagtcctattgcacatacataaacattagtttggatctgcttagacttattctcttgcttatagttaattaaaaacagtgtatgcaactatacgagacaagtgagaagtttataaatacagaagagtggggaaatggggttggcgttggatatatacatcacatttgaccatcttattttcctcttttgatttgatgtgaatgtgatagtgtgagcatatgagcatatgataaggcataagggagggaaatggaaccagatgcgtgccacaaacttcgggcagaaagaaagggaaaaaaggaatgtgacgtgaaaacccactcagcaacacaatatatagccatagtcatagacatagctaggcgtgatgaggaacagcataagtttttttttttttttccttcttgttgttatagaaagaataaaaatccgcattattaaatttatactattatttatacattatgttttttattttattttatactatagttttaatattattatatctaaatggattcatgtatttaattaatatataatatagaagtattgttttttcttactactttttaaataccgaagaatttgcgttggagctgaacaatcaacaatagcagcgaacgaatctctcgtacgtgtcactctccggtcaaatgccggtgcccaatcgcatgacacgtgtaagaataaacctccaaaattacaaaaacaaaatgcttatagtcggaattcttgactaactccactcccttgttaacaacgtgactacgaccccccatgccacttcccttctctgtcaaaaactatctccaacaatgatagtaatgataatgtacatgaatacaaattatttatattcatttgtttatgtaataatacatattaattatttgtatttagaaatgtaataatatatactagctagaaggtattgtgccttgtcaacatacgaatgcaaggaccccggataatcaatcacgctatcatataagatcctaccaaaccaaaccatatacgtggagctcaaatgaacacaaaatgtaaatttgaggttgaggtttttattatttttctcttcttaaacattacaaagcaagccaaaaaccttctaataaaatacatagcattgttgccttcttatataacatcaattatcttttattatataaaaagagaaacatcttagcatgcaagcattattcaacttgttatttttctttctcttttgattagattcaaaacgatcaaataaattaataaaggagtgcttcaattaattgagaagtcgctatcaactatataggtaataaatctttcaaccaactgactaataattctcgaatcgattgccttttgaggattaaaatatttgcctcatgttaattattttatatacttttttacaccctttaaaatatgtcaaattgcataatatatgaacagaaaaaaaaataatgcaacttactatttttaagatttgaactcttaagcttaaagtcatgcgacgacaactttaacgttctcataagacaaaaaaaaattatacaagatatttttttcaacacaaattaaagtgtgtgtaaacaagtgatatatgtaaaatatgattagatgttgtttgagaatatacggtgtattactattaaatcgagaaacaagtgatataaacaattgttcctttatttattttgaaagaagaaaaattgatttgctttagaaaaaaaatgaaccacacactgactttagaaagattaagatagagaaacactccccaattagctccaaacactaaagtgaggtgcaaaagtagaagggaataaaagcaagaagaaaaacaaagttctaaaccaaaagctcactttcccataacaagcaaccacatcgaatttaagtcttagctgaaatatcattctcaaagctacctttattttttgatctggcccttcctcctccaaccttctccttctcccattctcccatctcttcagtttctctcttccatggagaatgagaaggaccgtttttatgatccctttcattacaaccaccaccatgatcagcaactcaaccactcatcatcaagctttccattctttagggacaacaacaacaactcagcaccaattggctcacaattaaactttcaagggtttgatgatcataataacccttcttctcatcatcacaccactttcactgactgcttacatggttccatggattacaacaccctctcaagagcctttgacatgccttgttcatcttctgaagtgatatcctccaatattgatgaaaaccccaagaagcctagtgcaggaggagagtctgtgggggtcagtgggaaccaacaatcaacacctaattcatctgtgtcttcatcatccaatgaagctgaagcaatcatagaagaagactcaaccaagaaccagaaagataagcagccaaaagggtgtgaagaaggagatgaaaagcctaagaaagagtaggtttaaattaaaaattcttcttcttttgccctctttctttgtgatttcttatagatcaatggagggtaagaagattttaatttcctcatagactttctcttttttcttcttttaacaattcatgaataggatctgattatcttattaattattaactgttattttctagagggtatgtagaattttgaattttcttctttgaatgtactatttagtagtatttactaatgcaattatagtatgcccatatatcatttcgtgtcttttcagttgtttatgactttcagtgtctcttatgaaatgaattttgtcaatcttgtctctactctcttatactatatccagtgtgtgtaggtttttgtgtgtatgactaaaatggtggagagtgtggaacaattataggcacttaaccctaaaataattgttatcggtttggtgagtattatctgccatcttgcggtgaatttgactgatgttttggagcgtttcaggaacaaacccaaaaagaaagagaaaaagccaagagagcctcgctttgccttcttgactaaaagtgagatcgatcaccttgaagatggatacagatggagaaaatatggacagaaagcggtcaagaatagtccatacccaaggttaattattttttccaatttcgaaatttctaatctagttacttgtacattaatattaactttttaaggcaaaaatgatgagggctcttgtatttgtatcagccgaaaaaaatgattaagaagggttgtggaatattggggtgtgccaaaatcatcacatattgacacacaaagtcttctatttatttatttatttgttgccatatcgatgtaatgattcatattcttgtcatactaaggttgtgtaacagcttatttgtaagtacttattgaggcttgtttttgttattcactatctaatgatgaaattggagacataccacatatatattgtaaatatgaccataatattacacttacgtgtatatattcaacaataccaagaaattattaattcatcaagaaattatatacttctcatcaattaattgcacatttcacgtaagaatgtaacattgattctttatttataatgcaggagctattatagatgcacgagtcagaagtgcggtgtaaagaaaagggtggagagatcattccaggacccaacaatcgtgatcacaacatatgaagggcaacacaaccatcactgtccagcaacactaaggggcagtgctgcaagcatgttgtcatcaccttccttttttggttcctcttatatggcgtcaagcttaccccaagattttcttgctcagttgcttccaagttatagccaaaatgatcaccaaaatccaatgtttcaccaaaacctttcccataatctccatccccagcctcaacagcagcagcagttccaactccctcgtgactatggtttattgcaagacctactaccatcattccctggcaaacaagagccatgaacttaccaaaaacctagtgcatgttttgatttattttatctaggaaaaataatggttttatattttatgttactattagaaaaattaaaattagtaacggaatgatctatatatgttttaaaagaaatccgttactaaaatttagtgatcccgaaattaactggtgaaggaaaagtaattttctatcactaaatttgatcactgatttattaatttttagtagtatatatttctaggattttttttaaaataattatcttttcaagataaacagaattaaacatgcacttaacccatttctattagcatatggtggagcttgcagtgtattttcacattgtctatatataagtatgtgtagtaattaagcagtagcttccccttggttaattagctccttctctctttaagtcatatatatatgtacctagatttgtatggaaatgaaagacaggtctctatatggtaatggccggggatctaagagcattaaatgagtatttagaattactgcagatgaaactgatcttgattaatattcttaaatatagtttggtaaattttgtcaaaaatgtcagagatgggcggtgtgttttgcatttgagtactttgcaagttgcgaatatgtagtggagaaagatggttttgacaagacgattaacgtaccatatatgattgatctttctcagtgaaaggtacatatattgataggactacttagtgaaggtttcttggatcactagctaacacagttaaaagagtggtcaaggagtacgctactagaaatagaagttttcaatataacacgatggtaacgtagctattgattaattcctatttatggtccttatttttttgcattgataatttgatatatatgtcaatcattttacagtttttatatatatttcaaattatggggggattaatgaagaactatataggtacgtggaattaagaccgtgtatatatatatttcgacgtttcagttatagtgtatgtgcttgcgtgtgtaactatacttttggttgtggataaatacctaacttttaagattgatatgatcttaagctaccgttttattatttattatcttcttttttctgttttgtcgtgaaaccaaatggaggaatcaatatagctccagatgattcaaatgcaagctgaaattaattagcaataaatctttaccaactaaaccatttgtatatcagggtctactagttcgaaatgaagttatttaaaattaatgatctattttgctttaagaattataataaacaaatttttagaaattaattcaaggtctcttttatttgattattttaaaaaagaagaagcaatggtatcatatcattcttttgcttattattagatccccagatgatttaaaaatagaaaagaatgaaagaaaaggaattggaggttttatttctccattctttccttcaaataacctattttaattcgcccttaaaactagggtgaaagtgggaactgaattttttttaatagattaattaataagtacaataattctgtttcaaatgagtttccttttgttaattgccttattagtctttcaaaggaaagtaattttattctgttcgttttaccctttagtacatccataattgttattcatatattttaaaaatccaaacatatcatgaaaattctttattatacttaagaaatttagacaatttaaaataatatccatgccgtgccatattcataaatgaacactttgaaattgtaatttacatatttttttcctttttaaaaaaaatattataccaatatagatcataatatcataataattagataaattataatttttttggctcctttttaaaatattaattttctctgtatttatgttgtagtgtagttttaacttgtgtgcatgtgtactttcgaggttatacatactaagactgtcttttctatttgatttagactttcagtattcataattcactttaacttatttgaatttagtcagatgattcactgaaaaggacaattttttcgaaattttacttaaacttaaacctaaactagcacagttaataggctatattaacactctctatgttaaggctttttttttttttaatatactttttaaaaagagttgagataagtatacaaattcttattattgtgtaaatatgacattctaattaaaaccctctttctttatcaacatggcgaaatggtatgtacctcttctctccatgccagccatatatatgataattaaagtaatacgaagacaataattaaaaaataagcgcaaataaaccaagaaaaatatatacaacgaaaaaaaaaagcaagaaagtgagacaatttttcttcttgattaagaacaatatgttgcaggcatcttctcgaatctcgtttctcgatttgtttgttttgtcattgttgcaaaattgatgctctaaactttcaatattcaggagcattatcattttagaattccaaaactaatactattggattaattttcctgtttaaaaaaaacttgattcacgagctttaaattttttttatcattgattcgcgagctttatactaatacgagtatatacgaccaacctatgaattcgatacaagtaggcatgagaatgaaatccgtatttgtgggtatatgcttgaacttattttgactttgataagaaatacttgaattgattgggtatgactttgggtttggagattatttggcttttctaattggggtcggggtcggggatgaaatgtcattatcccgcccctagtcatagatgatgaaattattaaaattctcttttattactttagtttaggattttcaatttttcgttcactcgtttagattccaagttacaacacacaggtcatttatctttttaaaacttataaattgttatttactatttgtagtttaaattttaaaaaaatttaaaatataggtggatctttggtcagtagcattcctcaacatttgcaagatcaatagatattattgttgattagtaaagtaataactatacttatttactaatgtgatgttcgattttaagatttgaaagaaaatctaaatatatgatgtttgattttataaatatcggtccagaaagaaatgttgatggcatctttggtgaagttggtggttattttgatgatgaagattgttttcattttctaattatttataatttggtgtaatttgaactaatgaatattgggttagtgtctataactttgagttatgttatttaatatttggtgtattttgtttaccttaaaaaacaatagaatcaaggaagataaatgtattaatcttaattttatttattacttgttaattttattttagaatttttatataatataatatttttttgttgacgatttttgtagacaaatgtattacaataaatttattgatataaatagttaaaaataaatgtgtaacaattaatttatttttttctaaaatcagatttttaatataattttattaagtaatgaaataataaatttcaacccgtataaattaagatatgttgaagagtcgagattgaagattaaggccctgcctgtccatcctcgtttagcccgttgtcatgtttagatacaaactcgaatttgtgattgaaatatattagctgaaattatgtatatattggactagaataaatattgctgtgacatttgcaaaataactttcttttttctacttcattttttatctatttctttattcctttttcatcatattgtttctcagtctctttcttctcttcccttcttttcatctgatctcatacactataaaatgaggtttagttacccttaacttttccatgttcattattgaacaattatttgacgtttaccaattactttcacaattaattgtatcctgtttaattgattacgatgaattaatgataatccaactagccatacagctatccaagttcagaattttataagaaaaaaataatgcatccataaaatcattcactggttctaacttataaatgtatactagtatatgactataatgggcatattttatttatttattttctacttaaaaattaaatacgcaattttttttttttttgtgtgtaactattcaaacaccgggcccctaaaatcttaaatgcatgttttccgtagatcaaatcatacttaaaaaggaaaaagcaagttgcttaaaatttcagtcctttcataatcatatttgcctagcaagttgtctcgctcttatctttttgagatgagttacggtgttgattatttttctgcgatgttgtactaatttgttattatttgaacataaaaaaatttaatattagatctattattatctataattatttttatcttatttgtgtacatgtattctaaaaatgcaccctaaattaaaaggacattttttgtcattacaaatttgtattcaaaagacaagacaataaagtcttgatgatgcttacaacgcttcaataaagttatgggtaatttttatatatggaatttatttttaatagtatatatcatttcttaattagttacgtataattatattattgtaaaatttaaaatagtaatctcaaaaagcaatctttagcaatcttttagtgtaaccatatagtatttttttctatattgtacaaagctttacattataattttcaaagttcccttttttatccatatatttaatatacatgagaacttattaatttctattgtattttaattaaaaaatacattaatttctttactaataagtaatatcttaaagtactgaacattaaaaaaaaaacttaaaatacaatagaatgttgatttgaaatttgacacacgggggggtgttatatggcatacaaagtcaaagcaggtggagctaacggggctgactatagctgagggctgctccaaggtttaaaacattttaatatataaacattaaaaatataaaaaaaaatgatataatttactgttaatttcatttcgataattgacaactttgaaaaaatgaggaaaaaaattctaaatgatcacgagacaaataaaaagtgaaaaaactgatttatttttttcccacacaacttttgtagatcgcagaagtccaaatcattatggctaaaaattcggtttaccataattaacggaactaattaacaaactttgtaccatatccaaaccgtcttaattaattccatgaatgaatcattgagtgcctccattattgatttatcgtttgctctgccgccatagaagctttttaataagcttcacctttctcgcgacaaaatttgaatccttaacagtttctcagtctcgtgtgcttttagtttatcctaaatttatcaacgattagtcaacacaacattactatctcaacatcaaaatatttgctactttaaaaaatcaagatcaattatttattctaatatatcttcatttattttttagtatagattatatgtatcttttattaaaataaattaattttgttcgagttaaatagaatattatacacaatattttttaaaattttttaacacatacatatccaaaaatatattcatttattattattttacgtgaaattaagaagtccctaaaactactttatagctttcacattttttctccctcacacatttaagatatatgttatcattaaaatgcaattttatttaatacttatatgtaaggaataaattgcattttaacgatactgtattcagggacctatttataataaaagacgaatgaggaagacaaaagttattttgagggactctttttaatttattaacaaatagagactaacttgagattgtagttcactttgaagatacctagctattgaaaaatgaaggcggattaaccagggttaatttacaaataaagtattaaataatttgaaatatttcaccaaattgagacaatcaatactaaaaaaactctattttaattaaacaatgtcacatatacttttccgatttattaacattacataagatactgcgataatagtaacaatgatactggtattgtagtgtctcacatggacactacataagtacatagcattgataaatcaatatttcttttaaatattatttgacactttattagagttttccagtgttttctaccacaatttgataaaatatttcaaaagagatatacttttataattggtttgtaaaattaaccccttttaaccagttgtccttgtccaacttgtttacaacaccggcttttcatttgtctacacatagtcacatacggatacaaacaaagttgttgcccaataaaagtttgagtgacatgcaaggtatatctttatacaataagggaagtgtttcattaatgtgggacagtaaaaattatcctattttgtagaaataatttcattattgaagtagtatctcatgtaagattttatttttaatctttttatgaataaaaaacatgttaaaaaaatccaaataaacttacaatgcagttaaagttttttaaaatttataaatgattgtgaaaattttaaaattaattcattataaaaataaaattttaatccctcgagtaaattatattattttcctactaaatccttttagttatttgtacattagatttctttatcatgtcataaatgttaagtgtctaagaattttagtaataattattttttattaaaaaatttaaccgatcaactctaataaagtctcatatctcaattatatttttcactttaaaaaaatttaaactcaatatcttggttaactaagaatctaagtctaatttcatcataccaacgaaataatattagtgaatagtaatatttttaaacattaaatatatagagttattttttatttaatactttcatttataaagtattaaaaatatttgttatggtatataacattagccttgaaaaaaatttatcaaaattatcagttgacgtggaattagacatgcagacagaagaagtgttgcatctatctggcaaaagagtaggagaactagagaaatattgaagcagcaacgacaatctagcaaagtccctctacttttgatatttgaatcgattccgtggttgaaaaagtgacatgcttgtggctattgcttattgaaatagacttgttttgtctgacttgcaagttccaacctcaaagcaatgccttaaaacggcaattttccatcacattccaattgcataatcaacgtgacttgaatatttccaacttgttaaagcaaaagtaagagtagcagaatgtggatttacattttttaattccatgttagaactagggtccaaccaagctaatttataagaaacatctggttataagctaatgtatagaaaattaatttgcttaatgagaagtgagggaaaggaaagacttatagagtgattgtatacacccaaatgttgatactggacatgatcacacgaacaattttttgttgtgatcatgttacatactcttcaaacaacatttgaaataattatactcgttaatatggaaactagcatagatttatactactctattttagaagtccaaatactcagtagtatgcttgtaataaatatataaaattatgtgaaaaacggttatgtttgatagagagaaaggaaatagagggagtataaacaagtaaataataaaagaaaagagaaatatataagaaatagagtataacaaaattatagttattttatttgagaaaaatagaagggaaattgagtaaaaataagataaagttgttaggtatgaaagtaggaaaagaaaagaaatttaataatttttaaatatttaaatatttttttgtcaaatttagtctttgtaaaaaaattgttcatttttaattattgtaaattttaatttttttttaattttgattccttgtaaaatatattatttatttttagtttatatatatatatatatattttaatcttaatctatgtaagcgcaaacttatggaaattaaaattttgaaatcttaaatggactgaaattataaaaaaaaaagcataaacttctaagaattaaaaataaaataaaaacttctaaataccaaaattaaaaaataataacttacttaaatcaaaaacatatttaaatctttctaaaatatgtcattttacacttacacaaagaaaatgtattatttttttttttattgttggccaacataaacgttatgttgaatacacgagtgattatgttggagatcgaacactggagcttgtgaggaagaagaagacaccaacaacacgagatggaaagctagagtaaaagaggaagaagaagaagacatgaggactgtagggtcagtttttgtaaacgaagatagttttattatcagtgcaatgcacggactttttttttaactactttttttaattgaaatttaatttatgacatctaatctaattaaatgaaaactaattactctagagaaatttaaaattttattagttaaataaaaatttaattaaattagttaagtcagaatatagtaattaagaggataatattttaattttaaattattataataataaaacgtaatttcttccgagtaattcaaactttaagctaataattaaggtaaattttttattttgagttaagtaaaaaagttttttcatactttatagaaaagattaaactttcttacttttttaggataaatattcaatttagtctgataaattaatttttaaaaaataaaaaatttaaaggaacaatatcaaacattttttgttgtgatggtgtttcattactttttttcaagtcacacaagatatctactttctaatattttaaaaaagggtaaatagttattttcatcattgcgtagaatgttgacaaattcgtatccgaaagatgaaaattcaaattttagtatataaaagtaaaaaaatatgacaaatttattcttatgttaacttatgctcgttataattaatgaaagatcttagtgatgcatttaaggataaatttttctgtgttttacacattcaggggatgaaaatgactatttaatcaaaatataatttaatttttatcttttatccttttttaattgttacaaacagaacattataataagtatttaaaaaaataggaaaataaacataagttagaataaacataataataaatataatattaattaataaacataatttatctattattctaaaatttctaatgtaacattatcttacctaaaatataataatcaaataaaattacataattattaagttaatcattataaaaaaatgagattcaatttgattttgtcactgtctatgcctaatataatcacaatagaaatatcataacaacaaattttcgtcttttaaaaataaatttatcaacactctacacttttaaagataaaaatgactatttaccctttaaaaaaaaaattgaatgtcaaacctcgtcgttcttcccattttccttctcaacggtgccccccacactattcacccttctgtttatgttttctctcacgcttccccaccgttcacccttttcccttctgttttctctcaccttccccaccccaccctccctccacgaatcccactgccaccatctgctccctccgccccaaacccccaccttcacctcccctcgtcgcgaaccccacccctaccctccgctacacaacaaaccctcaccctctcctccctccgacactaccctcccacactctcctcccttcccttcgctaccaccatctttattctcatcaacaacatgtagagacagatatggtgctcataaaattagatttgtctttttttttttctttctaattttttatttcatttgtactggttctattgttcatctcttttcttccctttccttcgacgtggtaattgattcccgtgggtttctgctgggcaaagtgacaatttttttttttttttttttaggaaacagtgcggatcttggtgattcttgtggaagaaccagatttccagagatctgattgccaactccaataatgaattttaaaaagatcagatcttgaagttaatatttccttctaagaatcactattggatatgtccttacaatttcaaatttcaaattgcctctgcaatgtgcctcttccatactccatagtctaccaaagagcttgttgtcaaagttaaggcaaaaaagtagcgttttgtgttttccaatacaaagaaatgtttttttctcataaaaagattgtgagatattgcaatatttggacttcaccccgtaaatgagtctgtcgttgatttggaccataaagaattcggtacactttctgattaatgtttttgtttgtaacaaattgttaacaaacttaaaactttttaattgatattctgaattcgaattaagggaaaactgaaacttcaacatacccaattgtcttacacgtggcctgtttctattttttaataatataatttgaattttattaccttaaaaagacaatattttaaaaatagttatggtagttaggattgtagtttaacttttttgcattttatatatgatcttcattttgttcatacctattaatagttgcctcaagtttttcacttaaaacttctatgtagtgagtggaagttaatgactatggactccaccaatagttttttttttaaatatttctcgtatatttcacgtgtaccaatcgagggaagtcgtatataataaccctttttgcaaaaagaaataaaaatttaaatttataaaattcggtcgcaaaagccttagtgacggatttagcgacggagtttggcgccaggagcgctacaggtgctggaagttggcgccaggagcgccacagatgctggattttggcgccatcagcgccaaagtggcgccaggagcgtggcaagtcggtgctgaccattataaatagaaagctcgctatttctggagagaaacactgtttctcttcttcctcagagctccctccaccatttttgagtgcctaagcttcctagaaccttgtttgctagcccaaatcacttccattagccattgaacttgtgaggaacacctagaaagctaaaatcattcatccaaaccccttgaaaccttgagctgagagattcctttttcagaggaattgtggaacttgagctaggcaaggaactacggagattcaagaacattggggctaggagaagtagttcagaagtcttccttgccaattctgaggtaagaatctcgagtttctccggttaaattttgatttgggggtgtcctatgaatagtgatccatctgagttggggctagaattagtccagggtcctgtagagaaacttgcttagaattgtgtagtgatgaaggattagctttcagaattggatttggtgaactttgattcttggctctgcttatgaatgagtgacttgtgctgagtcactagctgatggttatatgacatgcaagagccttagaatgtgactgtgagatgcctgagaggctacatgaacgttgccttgagtaaggcatagaccattctagctatatttaaattctgagatattgaactgcacagagtttagagctctctatgttggcttacattgagtctggagagtgactctaagccttgatggagctgtgagctcatgatatgtgaactgtatagagtctgtgtggactcaggtactttgattgagccgatgagagctttgagctgatggtttgtggcttgtgtggaatctgtgatgaccctaaagcgttgtattaagctgtgctggacctagaagggtctgtgagagcctagtgtgtgctgggctatgatgaaccctaagttagaggacttttgattatgttatgtttgctggattgcttgaattgatgttgatatgtgtatatgtgcctggattagggcttgacaccgagggtgtcagtggcgggtgccacgaatcagggagagaactgcagagctcggctttgccaggtaagttcttggtccctggagatgatttctcgcttgtttgtgccccaccacactccgggaggagtgatggttacattcatgatgcatgcatttggttgttgcatcctcataatgatatgcatgtgcatctatgcttgaaaaatgtatgatgcctgttattagatcttctggccagtaagatggatatggacctccctaggagacggctattcctcctagttggtttgctcttggttgatgatatcccaggggatcgatgatccctcaagacgaaggggataggagacgggttcaaggacatccttctattctcagatgagataggagacgggtcaagaacatccttctattctcggaggtaccatatacgtgcgtctatgcataaggggtagctcccaatgggatggcacgggtgtgagatccggtctcacactgaggttaggcgttgatgtttatccgccatacatagagcaagatgactttctcatattgttatgaaggccgggaggccgggcagggtgaccaatttgattgtgaccgcttgatgtttgtgtcatggagagtgggccagggtggaggagatacctccccggaccttgagcttactgagatgtgtatctcaccccgtgtggggcttatatgttttcaggtgactcttctgacagaggagagcagtcttagggcaggaggccctagcagagacattgcatgcatggatagagatagcagaaagagagctagatagctcattttgattggatgtgattggatgcttgttagtaccctgtagagggctgtagggcgtgtttgcccatctgatatattgtatatgtttatataccctcgtgtgagggaggacattcttttgtatcaccacatgtatggtgtggaaattgatgtatatatttgtatagaacttggttatgtaatataaatgtttttcctcctgagtatatatctgtgaaatggtttggttatctgcctatgatgatgagtgataaactggaccagcaggggcatgtactgtattgatatactatctgatgagtgtgtgtgtgctgtgttatacatcccatacataatgtaatcaagaaatacgattcaatcgctttcgtatagttttcaaataacgttttaagcgcgattctgatattataaatgttaatacaccgggtgcacacggggtgttacatcgtacacttctttgcatttctatccccttcacttcttttcttaaatatttcacatgtactagacagagtcttactaatgaaaattgtatgtacaattaattagcatgtgttgcttacatgcagcttaattattcgtagatttctatattatctctgaagttaataaatagtagctgatagcttccatgtcttaaaaaaaatagatgcgtttttttcttttgttcctagctaccatgtttccaaacatacttaacattgcttgtatataagtagtaaatgtatgtaatttataaagcctatgttaacatataagtagtattaatttaggatttttgaccataaaagggtaaaaaaaaatcagtaattactatatgagaatagttttaaaattatttaccatttgagagtaagtcgtgccagaaagtacgacttctaaatcaaaagtcgtaccacctgttaagactttaatatttttcatttttttaaagtgaagtcgtaactttacttacgacttcattgtgcatattttttttttacgttcaaaagtcgtaaatatatttatgacttttaaactgaattttttatatttttatatttttttttctttacattcaaaagttgttctagtttaactattttctttttcttttttatagctatatatatatattatttttccttaagtatatatatatatgtttatttttgttttttttttaattttatattaaatatatggatatatattaaatattttataattgcttttatttattattttcatttgtttcattgtgaagttttttattggtcttgagtttttttttaattaattttaaaaatagataaaaagtagtttaattttattgtttaaaaatgcaagtaattttattttttgtaaaactatttaatattttgtaaatattttaagttattttattaagtattttagtaatttatgttataattactttggatcacatttaatattttaattaattttgtaaatttttgtagtaatgttaaaatttaaatttttagagatttattgttggatgaaaatattttgataataattttaacttgtaaaatatgaaataacatatatttattttgatttttctaattaaatatgttgattttgttaatgattttttacaaatgtaattatttatactttttttaacactatcatcgtaactatttgggatatattttaaaaatattatcatttaatatttaagatttaaaagaaaagattggaatatacttggggtgcaattagcaaattttattttttagtaaaaaacttataaaaaacagtggaggaatgtatttagtaatatttaatgtaggcgactttaaagtcgtgagcaatatgacgacttaaaagtcgtttggggttcaaaaagcaaaaaataaaaacagtacgactttaaagtcgtaaatatatatacgactttaaagtcgcgtatatatatttacgactattgagagtaaactaaatagtaaaaaaattgtagtttgaaagtcctaaatatatttacgattttaaattcgtaaacacagttacaacttttaaacgtaaaaaaaaaaaaatacacacagtaaaatcgtaaataaagttacgacttcacttttaaaaaatgaaaaatataaatgtcgggacaggtggtacgatttctgatttaaaagtcgtaccacctgacacaacttaccccaaatggtaaataattttaaaactatggtaattactgatattttttaccatttatagtcaaaaagtcattaatttaaatacatgcagtaaataacacgtttatgaaaggaaggaaggagaagtcaaaagctgtggcaaatatgggccaacttgccgcattccccatggagcttgtaaagtggtacgtagcagaagagaaagatagttatcaagaagcctagatgctagtccgtgaaaataggtctactttatcagaatattgaataattatgtattccacttccaccgtttgaagccttcaacttgaatcatttgtttgcctgtctgccaaataagtgcttcctcaagaaactcccatgtttagattctcttttcgtttgggtgaaataagagaatcaacaaaggattgaaataacaaatgcaaatttaaaagtttttcccttctcattatttcactaagatccacaaaatttttggtacaatttaatttatttgtgaaagataagattcctttatgacactagcatcaatggaatggaacaaaaattatgttaaaaagaatcaaaagataatcataactagattagccattcacaattttagtgcatgaaccaacaatgtgcttatgtgctgtgaaggaaagcaaccacttttacaaattactggggtactgcatcattcggtgctggccatcttgaaacgaaaacttaattaactatactgttagaaatgaaaaaaaaattaatgcccatttcttgtcagataatttgtgcaagttggaatttgaaccatggggacattgcttctacacgtataataagcacataagtgactgtagagacaaaccttagctatatctaaccgtaaaagcccaataatttggagggggagagaagcagcagtagtaatgataaggaatctaattgttgagaaaataacacaaataagccaaaatactgcataagaacatctccacaagctatttaacttcttaatttatatcagccctattaccacataagttttaaaattttcaatgtgcaaggctgtgtttggaaagttgttacacatttacactgctgtccaacagaccttttacacaattaggccttggattggcattatgttgaacttaacagatatacaaacacactaaaactttaaaaacttaaaacaaatctcacaagttatttcatatgtttatattattttaataagtcacacaagaaattattcttttaatgttacatttttttttaaaatacaaaattcttacatgagttctacattttcaccactttgtaaaaatcattaggtatcaatatgttaaataccttaaaatagattagtaaaacactaaaaatatctctataaaaaaacaacttttatttaccctttcaaaaggaaaatattgttagaacgaacaagatatagatgaattatccatatacaaaatcacaattattgactctaatggtgaaattgtataaaaactgattcttaagtctaagaatctcataaggaactcccatttaagatgcttgaaaaatatattgtcacttgacatggaaatcgaagccaagtattcgtttttactatcgccactctccagcagcgagtgactatgtgaggatatgataaagtcaaggaagttaagaaagaaaatcaacaatcatgtaagaagataggccccgtagcatctgtaaaacactaacactcacagcacccatactgattctaccctctttgcaaggctagctagtgtatcatatcttcaatggcaaccattcaattaaaaacaaaaacaaaacaaaacaaaaccttcattatccaaacgggctcactctgatctgattctatcctcagatgaaacaaaattttcttaataaggtcacaaagttggagatatttcaatatggtatagataagttactatatataacgtgtataacgggaattgtacatgcaggctaagtcatggggttgtcaatcctatccttcaacgtggctttcagaaatttccatcttttcagcatcagatggaccagaaatatccttcacggtttcaatttccatgctggcagtgccactctttcttttccttctatcctgaaagtgattattatcaatcagttgtctaccttacgttttagtgttttgttgtcaacatataatacttcaatatttagtatataagcacccaaaaacatgcatacaaaagaggaccatgctctttataatataatgcatcagaatgctaagtaggtagaattaaacagcatactcccactaatatgttatgataaacacaaaacattatgctttgtttgtttgtttgtttttgagctatactgaggtgctaattaagtaaatagaaattgtgtagcctgaagaatatcaaatttttgggtttaatatggcgacttttggttgtagttcttgaaaaaaaaaatattagttttagtttttatgttaaaagttttgaaaatagtctctatcaccatttattgatttattgatgacttaacatgcatctaaatatgtcatgtcacatgccatcttagaatgttcattaatgtgacctatatgccatattatgaggactaaaaccaacaattattatttgtaggaaacagaaacatattttacccccaatttttttcctgagttcatccaatattttgttctttctagttggtggtagcctggtaggttagccaatacatgtacgaaggagaataatgataagaatgcacacaaggtagaaaatatgcaaaattgtgatataagactcaagatcaaagttattaactaatcagtagaacttatgtatgagaagacaagatattgaagggaacctctcgaagtggatattcgtcagcttcaagcatcctcacaacttgactcattttgggcctcttttcagcatcaggatctatgcacctaagtgcaaccaaaagagtgcgcttcaaagcacgcagtggtggtttaacttcaaggcttgagtccactacttcttcagctctccgtgtccccaccatcgttttgagccattcaactagattaacctgtcataatgaagataaacaatatctcatcagctatttgaagggcagtgatcacttacggtggaaagcatggttagaactggcaagcagacagagttcataaaaattagccacctcattagcaggacgcgcatagtctacagggtcccttccagtagctgcttccagcaagaggacaccaaagctgtaaatgtcactcttctcatttaacaaaccactgttagcatattctggtgccacataactgaaatccaaaacaaaagtgagttcctaagtgtacaaatcctttaagtaaaaaataaggaaagagataataaattttctgtatacccaaacgttcccattactctagtggttatgtgactttcgcctgaatccaaaagtttggccaaaccaaaatcagaaacctttgcattgaattcatcatcaatcaatatgttgctagactttatatcccggtgaataacttttggttctattgcttcatgtaaataagcaagcctgccaccagtcacagtacaatagagggttaatcgggagaacaaggtccatcatcgaatcttccataaaaataattttgtaactaattaagaagtaaaatatttaaactacaataggtcaaatgttcactaagttgtttgaactaatggagtgaaatgaaatggaatccattccattccacccaaaactgctccttttcttccccccaatttgggggtactgggtgtaaccagtttttctaattcaattccattccatcataaaatattaaaacaatgcaacggtaaatttatttcattccatcacattccacccattgttagtaatttaaatccaaatatggcctaagatagtcagtggtcccatgggcagagtgcatattgttgtttagactagaaacctaatgggcttaaatatactgcaaactatatgagaatataaagtctataacaaaatattatcaagaaacataaatacatttaataacatttatgatatattttgacacgcacaaaacactaatagtaataacattaattaaaggaacacatttttacaatcaaaattcagagatgagagatttatgataattataccgagtgatttggcaccagactatacaaatgattaccatggtatatattttaagttgcaccctgaacttacgctttggcagtgccaagtataactttcatgcgggcctcccaggtaagtgtcccatattggtgcatgtctccatgtaaccattgttctaagttaccattgttcacatattcatacacaagcagcctgaatatcaatcaggaagcacattcattatgacagataaagagacataacatagagaaaagcttatgtcctattttggactaagtagaatatgactatcataaacccaaagctggcactattattgagaatgaatttgtgaaatataatacaaagtgtagtggatactaatgtaggaaaacaaagattttttttttttttttttacctatgaactccttctacacaatatccaagaaggcgtacaagatgcttatgtctaacatggcctatagcctccacttcaaccctgaattctttctcagcttggcccctaggaattcaatgcagaactcaattacataacaagattaaaaagaagtaattgtttatgtgtagtgtcagaaagtggcagaagaaaaaaaattaaagggtacaccaataataaataaatatccttacaggttgttaagaagcttcttcactgccacctcagttccattaatcagtctgcccctgtaaacaatcccatatccaccctcgccaatgatgttctcacttgagaaacgattggttgccatttccagatctctaagtgtaaaccagtggccccacccaagatgagaaaattctggcaagccaactaaaggagaggcagtgaccagccctccatgtgacaacgtagattgcttcttaacattcccagagcttccttcttcggctgacattgaactcaatcctctctcatgatgataaattgagctgcactgactgatattatcaggatcaccagatttgctatttcccaaacgaactgatacattatctgaattgttgtcacttgccttgtcatgaacaggaataaccacattttctggttgaacatgagaactctgcaccccaaccttgtcaacatcgatatcttttgagaaatttggtatttgggatacagaatacttgtccagagatctcctagactttctccgaaacattgcccatatcgataatatacacaaaatcagcactataaatgcaccgacacctatcccaatcaaaacccatcgtttcaaacccaaaaatgacgtcttctttgacaattccatattcaaagaactgttggatgacataattggttgcaccgagtcaatcaatatcgtccccacaagttcttcagctggtagaaccaagacattcccactcaagtacaggattcaagttaagtactccccttactcaagacttcgaaacacacatctgaacatactaatttacagccaacatttcagttcttgcaacaatgccataaacaacaaccaaagcaagagtttaacaaatcactaattgcatcttaatcatgatttaaggtaatctcagactacaaaatttcctgtaagctaaattagaagatgaaagactcccatctcaggctttattggcaatggcatacaataaaacataatccaattaataaaagaagcagcatatataattcagcagtttcaaaaccaacacaatcaaaaaggcatgatgaatgaattcacagttcatttgggaaagtaaaataacctgatgcatgttgataagcacaacaatttctaatgaaaaaaagaaaggaaaccaggaaagtatcacttatgatccaagcaaacaaaagagaaagtgaaatgtatattatccaaaaagtgattgagaaagacaaagcatttacctttgtggtgatccaaggtagctagacttctgaatcctctacccaaagaagcaacaggtttcacacctcatttggaaccgacaagagacttaatgtgcaaagaatacctgaggatgagcaacacacataccctacagcaaaatccagatgctgcaaaagatgtagtggcacaacagtaggtaacaagtgggccacacttaaacaaaaaaataaaatgtaaaaaatattaatataagaaaatggaagggaatgccagacaaaaatcttattttgatgggaaaataaagaggtagagagagaatggttgtattttactaattagagaagagaaagagtaaatgtggtaaaaatggttggtgggtattgtgttgtgtctgagggcaggaccagaccaagctggaaaggaagcttggtttgcaatgaaggaaagcagagacagagagagagagagagagagagagagagagagagagagagagagagagagagagaaacagtaaagggaaagcaaatgtgaaatgaataggtatgtatggtgtttatggatggctggtagaaagaaagaaagaaaaaaaaatggaaaattgtaatgagtaaggaagaaaggtaaagtgaagagagaggggagagagagtcaacctcaatccaacagacgagctgagcaccaaatctaggcttcctctgatgtcatgtctgttcaccaaactatcctatttgtgtgaaagggaaaaatcttatgcaaatcttgaaacttggcaccatgctactatgcttcccctcacatgccatttcaatttgctttgggttttggtttttgaacatcccaaaattaactctatgttttgaacggatcatagaaaaccaagatggaaagaaaatcttaaaatcaaaataataataaaaagaatattagaaattaatttttaaattaaataaaatatcattattcaaagaaaattgtatttttaatactgtataaattattgaatgaattattctatatgtatcacatataaaaaaaatatttttcctagtagagcttgatatgttcaatcctagactaattatttcatattattgagagagagagagggaaaaattacaacatttgaatatctagtaagaaataacattttttaaaattatgggaaaaaaaccagcaaatataaacacaaaaacatggtggagggaaaaaagtgaagtaataaaattgcattatttcttaatcaactcaaatttagtcaaataaggttaagaaaataaagatcaaccactttatttaagaaaaaaaactttttttttatataaagttgtaaaccaaccaatagcatatataatttattattattattattattattattataagaaattaattctctaccagtaatggctaaatttccctttcagattagattaaatgggtcaaagtcagaagcttttagttgccaacttattgaaaatacatatattaggcgaatataacttgctgaaaggtatgtttttttgcccttaatagataatggcatgccttgatgtttaactatgccccgcatgatataaaattcgggtgactatagtgagagaggtaattttgtcaatacgttttgactaagcttgatcttcagacctttcctgagagaaaatcgaaagcttgagttaaaaactgtgcattttctgagtatgggtttagagggccacaaaaagccaccaatggaggaagaaatagatactttgattcgaagcataattttttattaaagataatccggacaaaacctttgcacttttcctcactttttttttttaaaaataattactattagaattactatttttttattatctattattatatgagcttaaaattactattggctcaaactattgtcaaggtattcctttttatccacatttgaaagatattattttatatatatggttcaactcttgcattttttttccggtgtactcaactcttgcatatagggatttagtatttcaataataacttcatcaagtctaaattcatagggaacaacatttttatattaatataaaaatatatagtcaacaaatataaaatatccaaatgtataaagtagcaatttaatcaaatattataatttcacaaagataaaagtaattatttccccctgtgatagcgggaatgatgaggttttataattaacgatgtgaatcgaaaagatatattattcaattagtttaattgtgggccaaacatgtaatatatcaataaattgttataatttgaattctaacaatactattatttttttgaaagcaacatctgtgaattttctaatacagagtgcatagatagttcttaatcggataaaaaaagtaaattagttcaagtgatataaaaatttaaatatgttttttccctcaaatttgtatcattttattttttcctccatattaaaaattattttatttaattctccaattttgcaaaatactttttcatccctcttatataatagcatatattaaacgcattgttgatgtggctacttaatgacatccacgtcaacaatatacacattaaattaattaaataacatttttttaaattaagtatttttatatctctcaaatttacatcaagtttctatttgatctccaaatgtaaaaatatatatatacttcacattattacattaggattacggagtgaactctaatcaccaaaaattcagttcattaaataggaaagtctcattacataaatttctctgttttctcaaacacacataacaccgaggtaaatatataaaaagacaaattttaacggatgctgctacaattggagggttttgtcttataatacttcgggtgctaatgaaactattttagtaaaatttaactatctcaattctcgggtgattgcacaaaaatttcgagttcaatttattcgtattttagagaaattatatataacttcttattcgtattttagagaaattatatataacttcttgaagctctatcaagaaaaacattttgtaacaaagaaaagcatgatctagctacactttagccacatttaatatatgcattaggtaacaaatcatttacatcaattcattttttctttttgactgtggtggtaaataaatttaggaaaagattggtggaccaatcttctggttaacacctagagagaaaaagagaaaaaaaatatataaatatgagtatatataataagtgaaatgatccgataagaagaaaaaaaatacagaaaaataatagatattgatgaagtgtgtaatatattaaagtggccacatatgtgaagatattcacataccactctcataattttattacttgttttgagaagagagagcaaagaaaatgcacttaatatatagtacgtagcacttcagattcctccagatttggaaagttgcttcaaagcattagcaatgttttcatgtgttgtttcagtaatggatgcaacaagagggctctcatttgggacaatatcatctctttggtagcttcctggacctcttagtaactcttctgaacccttagacaccactcccttcatgattatggtcttgtgagttccagaaatcatctcctcataatccgtgtccccggtttctccaaggatgacgtacatgtttgcaacgttcaatctccaacgtacaaagagatacctaattaacatatttaagcaaataataaacattctgtttgtgattaggctaacttttgaaaaattgatttcaaattaaattgattctaaatataattgattttgaagtcgtatatttaagtttgggtgtttttattcttaaaaccaagtaataaaattttgtataaaatttcgaaataagattacttttaactaaaatcggttctagccatagaatcatgttgcgtttgatttgacattcctcgagagaaaactcgcacaaagaacatgcccatgatatttggaaactatctatcttagctttttatgttaagtgtgtgtgaaattgatgcaacttttaaaccaactagatcataacatgctatcaattcttcaacgtgaaattgaacacatgaacatttacttaaaatgcatgttaattgatactattttaatgtgattttggatgactcaacgtgaaatcaataatgtactcaatattacttgttttatattatgaattgattgaaaaaattagttagaaattaaggatgaagtgttaattacctgagtgcctgggctctagatgcaagaagaggaatcacatgcattctagatgaccccctgcagtacataggatgacaacgtagacctcgcatcctaagcttctgcctcaactcatcaactttttttgcctgaatttaatacacatgattatcatttatctcttagtgcctccagctagccattatgtaacttaatataatggtaaatgtcatgttgatttataccttactaagatcctttattttgtatgagatgcaatgtgcattgctggatttcagatcttcctcaatggggctgttcccatcaccattcataagtttccaaatggttttcttaagaccttcacacccccaacgatagtcaatatgtacctcataatctggatcaggcaaaagctttccttcttctgtattgatgccaggatagtaaacttgacttccactactgcaaattaaagcatcaaactcattcacttgaacattgcctgatgtaaggaactctactgtttctatcactggcatagcagttgataaagcaatccctgtaactctagcagtttgagggtctagttgcacagctttaattatcttttgcaccatctcaatcatgttcttctctggagctccattattgtcatacaaatcaagtgctataacaatcaacctacgccttctcctcaatagaggatatttgctagtgttagtgttagtgctagtgctagttacattgtcaagaagcatattgatatttccaccaccattaccatttgagccagaatctgtcttccttatcttgcttaggatgcgtttaacttggtcttgcatatctagaccagtgcctccacttgctgcagtcaagtcaccatcaattgagagcctaagggacatgtcgtgttcgtccttgagcgaatcgttgaaagactcttcttcttcaacagctttatcatcctctggattgttggtttgccattgtggatgcctcatccgacaggcagccgcccgggtcaagtaagtgcgacagtgttcaggccatgagaaaaggtgtatgttcttccaaccgttcttcctgcactcatgccacatgtttttctctgacaacaacttcaccaatgcatcagcaattgctatgtcatcatgaggatccacaagcaaaccattgttcagggcctaacatcacaattcaaaaggagctagacctaattaggtgttcatcctgtttgatttccaaaataaataaaacaagaaaaagcaaatatgggatgtacaattaatatccaaatcactacatactgcattttttttttggtttcctccttcggaaacaatcatatttgaggccgtgtcagatactaaatgtgagtaactctcctagtgggaattcaaatcttggtttacaattttttttccaatgctttgatgccatttgacaaataattcatgaacttcctagcatgcatcatgcaactgactatctaaacttaattcttaaattacccgatgaatgtccacaggtcccccatttttagtggccaccattggaagtccatgggcagctgcctgcatgagtttaagcacattcaataatcacttcagcatcaaaataaggataatattacaaaagtggctagttagttaaaaacctgcctcaattaaagtaaggccaaagggttccactaaagccggatttatgaaaacaccctgagagaaatttcaaactagttagctggccatcattgttatcacataagaagttagatctcaacatatactaaaacttcaataaattttatacctttgtttttgcagcaaatctgtatatctctggaacatcagattggttgtgatgttttgggtatgccacttgcccgtacaggtcatacttatcaatcaatttcaacactgttgtgagcacactagcattgccagaggacatttcatctatgtcatccctgtttcccattataagcgtctgtttgaaaacatattagtcctttttacaagttctcaaccatagtttccaccaagtattgagcagttgaattatgtcaacttacaagattagctaattctcttaagggacggcattctccaaaggcttttaacaaagtggttatgttctttttcggatctggccttgacaaggctaagatcataggtttatgaggatttgtgaagaaacgcatcacctgcacaaagttatcagttacaacttgacaaggctagtcattgactctggatttataaaggaactaaggaagaaaacaataagcaaaatgaatcaaatttctttcataagaaaacttcaataaaaaaaagttaaaatacataaagtgattttaacttataggagaaatttaattcattttaccttcttattttcttctcctataagtatttatgaagaactcaatgtaatccaagatatgtagacatgttagttactcacttctaaccagattgtaggtaaagcctttggtgaagactcatcaacaccacgagtaagctgtgtgagctccccatcaacttcagggccatcttcttgtgtcacaacattgctaaagtccataccaggcgggataacctacataagtttgaaccattagtacttcatacaacacgttatcttaaatttgagaatttaagacatgctaaggtgcataagaaaacaccaaataaagtaactgatataaccatcccttgaaaaagttggtacatagttgtttccttttccaaagaagtttcaccaaggtttaagaaataaaagactttcaaacattgagtgtgagtgtgtgaccctagttgcattcttaccgccatccttggcatgaatcggccatgacaattaacaccacgtctaactcgagctcgcaaaactttctcaagcttgacatcaaacccatcataaagtccccattgctcatcaatttcttgccttgtgctagtgataacaagttcagcagcatctagggaaagctcttctgcttctattctcctcattatcttatatgttgagttgatatcctccttcgattgacgcccttgcttaagaagctgttctagcttgtttcttccaagtgaatggccagtgagcaccattggcacattcaaggcacctgaaagaagagcagcactatctccagcatcggcataatgtccatgaataacgtatggccacacaggttgccccccactaacttgttcacccaatacttttgacatattgagaatgtgagctaaagccccatctacaaattcctgaatatagggccaaagaagttctttctgtagatatttttcacgtggaccaaagggtattcttatgatatatgcaccactgctctccccaatgttatcatcatcctcatctgtgcctgcacttagcatttctgtaggttctccgtagctccaatcaatttcaggagatgagatttggcgtgtgaagaggtctactctatacactcctggcatttttgctagtgcacgagcaagttctaccacatatttaatctggaaaaaacatattggttgaaattgaatcattgttgaacaccaattaaggctatgtttgataaaagttgggaatatgtttttgggaattccaattcatattcttgaattccaagacaaaaaatgagaaggaagattgattgttttgagagtataagtatttttaagctacttcaaccaagaaattattagataatttagaactatcacctatccatagttttgactaatctatgtgacatgtactcgaattttttcatttatgaaaaagaattaataacagttcattacttgtcatatacgtgaagattaataggacaatgatcatctcagaccatctaataatttctctcaccaactggcatcaaaacacacactaaatggaagggtcacagcttattcatgtagcaatgtctaatacctgtccaccagtatcagaatctcgaccaagctccatgttttctcctcgaaccaaaccatgcaaactgtcaaacgacaagggtcatagtcaaacaatcaatataccttagtaaaacacaatcaagaaatttggctaaacacatttattgaatgcaaaatgattgtgagaaagtgaagaattaatataccttaagaggacaatgtaaagtttcttttcctttttgtcatcagaccatacttccaagttggaaatctgcctctggaaatttttctttgatgtctcaatttgtatcatctccccaatgccatctcctttttccccttctgacaactcttcagacaggtcctctgttgcatccctgcgtccttgttctctctcccatcttctgtttgctaatctctgcagctcctccccttccaactacaagtagtgccccattaatttcactaacaatcactctggtatatgtgtatatatatatatatatatatacttcccccaaattcatcgaatgaaaaagcaaatacaacaaaaatgaaaatttacaatttaaaccaaacaacattttgcttggccactcgagattctattgcatagcattcaacaaaatcaaacaaataaacattaaaaaacttacgtgcacatgtacatatatattactatcaattctactttcaaatcaagtgttattgtcatgtttagtgttatttttttcttcattcctaacaagtattcttcttcagaaccaatcttgtttgttgtttgaagtattgtcagacactaaatgtaaacaactctccctgcagggttcgaaccttaggctttgtttggaagagggattttagaggggaagagagggaagagaaagatttaggtaaagacatctctttgtttgagagttttaatttttgagggaaaagatttgaggatttttaaaacttatctgaaatctgccaaagcctacaaattgtagttctcccaatttggaggtttttagaaggaaaagtaattaaaattattatcttacctcagctacatattcaaaaatatatttttaatatatttttaatatatttttacatttaaattatataattttcatatttaatatcttattaactctcaatttccctctcttaatatatttttaactctcaaacaaggaggaaggaacttccctcattttcctccctttttttcccctcttccccttgaatctctttccttcccttcctctccaaactcccaaacaaaaccttaggcaattagcactaaatgaaatatgattgttacctgtttcttcttgcgggcaagatgccaaattcgccagcacatgttctccaaccttgagctgcgttccctggtgttacgagtggcaaccaccttgatccatgtacggtgaaggtcagactcgtcaacactggacaccacttcttccacaaagtactttgtgggactaaaatgtgcactttctggtggagccactgctttttgcatttgctcatcaacggtgccagccccagttccagtggatagtatagcctcaaggtacccattaatccattcattgccagccattagaatatatatatatgcacacaaagtttcttttgtgttgttgtctatatatgtgtgtaacactagtgcagtgcagtgttgtcttcaaacacacttcaaaaccttagaacgtggggaatttcatgaattttacgtgggaattcattgacatggccgtccacgtgcctatgcaatgaagaggcagagtatgcgatagaattaaggtgcaagagattatttggttgtgttggaaagaagagtatgagtgggaattttattatgacatgttgaagaggaaagaaggagaaggaaatggaaatggagatgaagagaaccagaccacatggtaggtacggaatgatgagccccgcatattcttcattcgtttgttcttatttgtgtgtcttgccttgtcttgtgtggttcatgatatgcactcattaatattaattaataaactgaattttacgtgtgtcttattcattaaagaacaccaatcacaagattagtatgttttgataaagagtgtgttattgcttactaggatattaatactacttttatattgttttgttttgcggaggatttattacttattattataataattttatttcttgtatctatttctctcttttaaatcttaaataataaggaagtgttaattttttttttgtttctcaaggtcatattatatatctaacatatatatatatatatatacactttgtttttctcttctcatctctctttatcttgtgtgtttattgtaaaaaaattgatgtgtaaatcacattactccatgtataaacctgcctcttcctttgaactttttgcttcattgtagtttgcaatttttaaaattttattttaagattaaactattttctaaattttcaaaattgtaatatttgtcttaagtaagttagtaatatgtatgaatgtccactttgtagattgaatatggtgcatgcactagaaagaatgctttcaatattcttactttaacatcgatttttgataaaatcgatgttaacaaaagggcgataacattttttttataaataaactggttttgttaatatcagtttttaaaaaaatcgatgttaacgtgacgctcttaatatcgattttcaaaaatcaaagttaatgtagtgatattaacgtcgatttttcaaaaatcgatgttatcgtgacaatattaacattagttattaaaaaaattgatgttaacatgacgatgttaacactagttttataaaaaaccgatgttaatcgatttttgttaacatcggtttttaataaccgatgttggatttttactaaattaaaactcaagtgactaaatgtttttaccataacatcgtgcttactctttgctactttgtgctttcctacttctttgttctctctttctcttctccaagttcgcaaagaccgacaagaccaatcattttccacatcggttttataagtactattcaacaaaatcgatgttgtaagtactattcaacattggttttggcagaactgatgtagaaagtgtttatccacatcagttatttaaagaaccaatgttgtggtaaacttgacaacatcaattttcttgaaaatcaatgttgtcgtgtgcaacacaatatcgatttttagaaaaatcgatgttgtcaagtatatcataacattgtttttttaaatatcgaaattgatttttatatattttacattttttgatttatttcttattatacaacatgattttcttaaaaattaatgttgtatagtgtatcttaacatcactttttgaaaactgatgttaacatcgatgttgaaagtcgaaaacaaccaatttaaaagcttattttctagtagtaatccatatttcaaaattgattacttatccatgtcatactgatatatatggactatcaatatgttattataagagtgactgtgtatcaaaacttgaatattttatattctaacaattctatataaattaaaacatgtattaccataacttgagttataacatatttatttaaacttggctacacaatactttcctcataagttgtgtaagaaataatacaataatgataaaaatgcatatgaataacaaattaagaaaatataaagaaaaaaagaacagataaattaataaaatattgaaaatatattactataattacatttagcttaaacattataacatatatacagtaatatacttatatcctatttttttatgataaaaaaacatcgtatttacatatgatattcatttcttgtactcatatcccatacaacataataaagcaattaaaggttggtcaattataaagttaggtaatatgaattgagtgtgggattaaatttccacaattctttttcattctctctctctctctcttttttttatcggcttctttttcattctcttatatcctccctcttataagttctagtatcagcttttccttgaaaaaactaaacacaaaactacaggtcctcagcactcactagctagcaccattttttttggtatgtttcactatctatctttgtcatttctccatgctattgctgatatgcaacttatacaactccacttgcttcctgcaagataaagtcatcaacttggttatatacagattttaaagttatgcacaatcatctaatatatgttttatgctttgtcaatggagtttaattaccttaatttgttagatttgatatgtgaattattgtgaatcttttgataattaatttttatgattcttacggataaaaaatatggtttagactttaataaaattgatatcttatgtattttcaaacttattaaataaataaataaattaccaaaaaaactcattaaataaatgtgatgacgcattataacataaaattcatacttttgaacagttttatatatttaaaaatttgcctctgttgtctggcactcaccaaagcttatgatatgtttgaacaaaatggttaaaaatcaaggtgtcgcccatgtgtttgatgcgaaagtttgtggcaagtgagccatcatccctcaaagtggtaaccaccatcaaccaaactttatctcttctcttaacatatttcccttcattgttttagagctcttttacaaaatatgcgtttccgaaatagctagtaatgcattgaattgattgcaccaaattttagtttcgatacgattgatttcattggcacgtccctctcctttggcaatcagacaaagaaggtagctatttgggtgagagttggcaaaagcagacaaactagtgtttgtggtacttcgtcacacttatccttttgttttagactgattcactgaatcgattccaattgatatataaaaaaagaaacacgttgcttgttgtcttgcttcttctttgttatctttgataaaatttaggaaccgttcacgagtagtttaaagatattaattaaaaaattaaaaaaataaaagcatcattaaaacttaatgcataaagatgttaataatcttcaattttattacttttaataacaatttttcacttttattttttttacaagtgttctaattaacattctcctacacgtaacaatgagaattatgtgataaattttgtattcgtaaaattttaaaaaagaccaaaagccaaatgagagggttctccgagatggctcaatctagttacttgagatttttatggtcaaaaagattgaaaatttaaaccatcttgagacttttgtaaatcgttaaaaatatccatactctcgtcgaaaatttcatagcacatgctcaatgctctgcgtatcatatactacataattcattttatattttgtaaaaatttccatacattaaaataattgatattgtttatttccactattttcttttccttctttttcttttcttgtcgtaggattggcacatcctgtaaatacaaaaattagacagcccatatgtacccagaaataaaaatatagcccataacagcgagccacttattagggcagcccattcctgtaagtaaagttagcaattagagctacaacaaatacccaaacaaattgattactttactgatgtttagttgcttaagcagcacgtaatttgtaagattacagtaagaagaattaattataatattttgccaaattgattaccattttttttaagtacttaagctcaattaaattttgaggaattatgaattgtacctgtaaaaggcttgccaaacccttttcttctggcaccaatttgaccagtgaaacaattgaaggttagtccgttttcagattcatttgaacttcatttttcctttagttcactttaatttaagttactaagatgtttaacaattcatctactctactgaataaatcaaacaacataaacatgtaatgcttttgaggatggaaaaaatggaatgctcaatgacagtaacaactaacacagatgcacattatgaacatcaatcatgtcgtcatgtataaactaattaatagtattattattgctttgaccttttttttcaaaagaaaaaaacctcgatctaagactagtttttcttttcctatttatgtacttaagacatgtgaattgaaggtttacaaaaatacatgactgttacgtacatataataacaagacaaaaagaaaaactaaaaacatgagtcacacccacccacctggccttgcattagcaataataacattgttatttcatggaaattgaaaatctccccctacaccttgtccttcagcaccttggggcgggctaatggaaacccaaagcaaagaaagtgtgatcgcaatgagacctgaccatacaaacacaatagtgggtgtcttgcctctcctccccatcaacccttttgcaaaagggtacaaatgagcaagcacccagaaactgaagaatgcacctccaataaacttgctccattgtgcattggcactgtaaatagtcctggaaaacgcaacggcaatggcaatgatgttggtcatagcaataacaattggcggaaccatgagtgagctccacttgactagatacaaatctgcaaacatgtcatcctcatcttccccggccgatttggacgtcagcgtgaaagagatctcaatccctgccatcaccttgaggagtccttgcaccacagcagccaagtgagcactggttccagaaatgagccaaaactgttcgtttctccaccattgctctaactccacaccagaccacttcacctccagaatggccagcatcaccaggcatacggtgatgatgagcaagtagattaaaaaggcaatgctgagggtttcgacaatgaaggaaccagagaacaaagagagcgcggggaggaagcaatacacgacaaggaagatggaggtgaaggggtagatgccaacgttgaggtaagagagacgctggagaagctggaggcgcttgctggcgaggaatgcgttgttcttagagaagaatatttcaactgagcctgtggcccatctcagcacctggtgcaatcgatcggtgagattaattggtgccgatccacgaaatgcatctcgcttcgttatgcaatacaccgaacgccatccccggttatgcatgcggtatcctgtaaccacatcttctgtcacagacccgtaaatccatcccactctgtctccccattcagtcttgtcttcgtacctattatacatagacaataaattaagaaaaatctttaagaactcttttgagaaaataaaatgcttttgttaaagagaaaactcttgttcaagataactattctaattaatatagagaaagacgaaccaacaagaaatgacagatacggcttcggctacggtagtagcatcgagtggctcgcgaggggtcctaagaacaccgattggacgtccaaacttgatggcggggtgatctgctaaaggacgtccttggaactctgcgatgggtatgctctcagccagcatggttgaatttccaaagcgcttggggagtaagttcacgtcaaggtttggatcaaactcgctggcattcatggacggcgtttcggacccttgaatctttttaccatctttcttgtcggcgtccttgtccacgaagggagggtcgaatccgtatagagcaaatcgtcgaaacatgcatccagttcccacgtacattggaccttgaagaccatcaagggctcgcatgtttccatcaaagaacacagtgttgtggttggcataacggtctgaagggtcaatgccttcgaatctttgtgggaactggatgtagcatatgtcctcgccgcctctgtccatcatgaagcacatcccttctcgtactgccttgcagttatagacataatggtcacagtcaaggttgagaatgaatggcccgttcgacaaaactgcagatgctcgaactaatgcattcatcgcaccagctttcttgttgtgatcgtaacctggtcgtttctcccgagaaacatatacaaacattggcaaccgtgtatctacctctgtgaagtctagaatcttttcatctgcacttccaattaacggatcgggacttggtggctttagcatcacctacattcattaacgcaaaaaagttggattaaaatactattattatatatatttaagttaaattgattcttggatatgcacgtcatatctcttttattttattggttactcaaattgctagctagttgacatggttgatccaattaagtaatatattcatgtttcacaaagaacatgaatttgattttcgttactaacgtgagaaccttcatggtgtataatatattaagagtaagctgtaatactatgtgatccaactctgctaaacttttttcaaaaataaaaatagaaactgctagctaggtgccaacaaaggttggttccagttgataactaacatactcatttcgtaaaaaagacatgagttcgattttcaatgtccataaaccttgttggtaaataatatgtaaggtctactctgattctatgtgagtttctgaattcaactaagctaaactcttctcaaaattaaaaaaataaaaatttctaggtaggtgtggtacctgaagtattccagcatggtcacctttagcatgttcaccagaaggattggcccatgtaccaggccagtgagtgccatcagccatccatgtggcctttaacactttgacagactcagaagggtcagctccactctctttcatatgcttcatcatcttcatctcctctctagcattaaatgcatcagatcttctcctgatggaatctggaaggccatttatacgtaccttgaactcatcatactccctcttaactctccttctgtccttgacaaaatccgtcccgcttttgttcttggtaggatcaactttcaagctaaaatatgtgtctggattcctcggctcaatgttgtgttttcggcaaaagggaacccataaatcagcaaaacttgcagcctcggccatggcttcaaaagtcaagagagcacctccatcatcagaaacgtagcatgcaagcttttcaacagggtaatcaactgctaatatggaaagaatggtattggcagtggttagaggtggctccttctcgggatcagcagtggacacaaaaatgtccataccgggtagatcagatcgcccagtgggatttgatggggatggactatcaaatttttcatgaaggacttcaaggtcagtggaacgattcacagggcaaagcttcggaatttgatctagaatccatgagaagccaaaccatatctcacaagtaattgacataagccacaaccatactgcatctttatttggatttaccactctccagtgtaaaaaaaagcacaatactataagtcgcaccaagataagtaacctgcaaatagatacatagacatagatttggtcatgtaattattattattagacttaaatacatttttttatgcaatttagtatttttttatttttatttttttatttttttcattttagtcgtaaaataatatgtatttttcatctttaaagaaatatatagtattttaaacagtacaaaaatatttttttgaattatactataaaaaatttgtcatctaaaacattttacagataaaaaaataaaacaaacacattttaaaaaactaaaataaaaaaatacaaagataacaatgaacaaaatgttaaattagataaaggaaaaatgtatttaaaccttattattatgatcgttataattacaaactatgggcagcataaataattgatataattaattaacctgtaaggacttatgatgcctgatggaattggtattacccggctcaaaggcttccatggcttctcttgatccagcattcctgcctttagggcatcatcactatcatcaccatacatgtcatcttggggccaatatgcattaccaactccgtaggtaccttgagtctcaaacaaccacttgttatggtcaaattctccattttgatttctcttcataactgacatgttgtttgcgttacgtttggaaccatctggcgctggtaatggcaatgccccattgttagaatactgatctgtgaggtcttcctcatattccccgactttatatggctccttgcaaccgggacacataccagattctttttgtgcatctataaagcaatctctacaaatcttgtacctaaatttgaattattattatgtaacttagttagtttctcttcatttctcaacaagaaatcaaataaaaataatgtcaaaattaagaaatgatgataagacaaatgctaacaagtatccttgagacattagttaagaagttaaaaaagagaaaaattcttattcagagacagaaaattatgttttttacataatttttttacactttcatattatttttacaataattattttatctttttaattccttaaataatgtccttaggattatgaggacctaataataacacgtacctgcactcacagggagtgacatcatgtcccctctcatccctcatgaccctgccatcacaaattgaacatacagagcctttggagcctgccatttgaggatgagtgacttcagaatcaatgaccttatccattagatgcgctcgagtgacactgttgaatcccccggtaaacaaagaattagaaacatattgttcttcagctttcattgcaacagatgagtccatgggttgattgtctggggtaggaggtatatgaacagtgtagttcatgtaatcccctgataagtctgaggacgcatcaatgtcatcccttgacagactcacatatcttccacttgaagttcttctcgcaaacttaacacttggcccgctagagttttgtgacccttgagatgttgatcctccagaactacgtgcagatttcttcgaaggttgcctattaatggatgacattgtttctaattgctacaccttacacctacacctatataatttactactttttctagtaattaatcaacaaaatctacatgtatattgtattccagtgctagcctattttccattttgattgataaatagcttggtgatgattcctgaagagaaattaatggaacaagaaatgtaaatgaaattatatacaccaacattaatttaccgtggcaagatctattggatgttgaacatgttatagctacactgaaagataagaatgaaagttcaaattattcatggtaagagaacaaaagtagttagagagaagaagtttgattgacaatgagagatttgtcagagtatagaatgttgacggagaagaagaatgatttatggtgccagaccaagtctatcttacaatgctattttcagtagtctcacttccgaattcatagaagtgtgttgctctctctctttatacatgtgataaactagctatttgattttataacttttctatttatgttcaatcttcaactctttctatttttagactttatctggtttaaattttgttcacacactacttttttatttttatatgattaaactatatttcttttaatttggttaagaattttatgtattttgaagaaaaaaacttggtccattaaaggtgagatttttacgtactaataaaacatcaattgaataactaagaaaaaatatattaacaccaacaaagctaggatggtagactctcatagggttttgtgtgagacctcataacgatgcaacaccaagaagtgacacaatacagaggagcagtacagaaacagaaaacaagtttttatagcattgcaaaggaattaaaggaaatttatagagtaaaattagtaaaattaaataggaaaaacaaatctataattaatcttcacttgaatcttcagtactataaaatatattttataaaaagtaataattgaaagtactagttttataaatatgtagttaaatttaaaataatacataatattttattttaattaataactaaggatctatattaaaaaataaattattatgtatataaaaaagtatatttttaagacattggatatttgtttgtatttgaaacttattcttgaatttctattgacatgaatattggttattatttgagatattaaataacttataatgatgatcattttaaatttagcatattaattaattaaattatgttagttatttatttttatattgttttaatatatactaagtcaaattgatttgattagtgagattgattccaccaatgactcgttaataaaatgtctcacttattggatgatgggtctagttcttaaaacactgctcttaggcattgcattgtgtcttggtcctaattcgattcgaccaataattcattaatccaatgagacttcgatttccatcaataactcattaagtcattatctcaaccgattcgatgttgtatatgattcttaaaacactactccgtctactcgtaagtgttgtggtgcttgttggtcctaatttgattcgacaagtgagactctaatttgacccaagatccattaacccagtagaactccaattccacccgtgacccattaacctaataagtctagcagttcgataatcggctccccagttcttaaaacactgctcctaggtgttgcgttgcgtgtttgccctaatcgtgagagagaagaaaggaaaggggaaaaaatggtgtgcataaggaaggcgacggtgaatgacctactggcgatgcaggcgtgcaacctgttctgcctgccggagaactaccagatgaagtactacctctatcacatcctctcctggccccacctcctctacgtcgccgaagactacaacgcccgcatcgtcggctacgttctcgccaagatggaggaagagaccaccgactgccacggacacatcacctccctcgccgtcctccgcactcaccgcaagctcggcctcgccaccaagctcatgaccgccgcccagaacgccatggaacaggcatcccattatttctttccatttacaaattacaaattagtcgccgcgtccgattattttttagccctcaatttcaattttgattgatcgctgcaggtgtttggtgccgagtacgtgtccctgcacgtgcgcaagagcaaccgcgcggccttcaatttgtacacggtgaccctgggatacaagattcatgatgtggaggccaagtattatgccgacggggaggatgcttatgacatgaggaagcagctcaaggggaagcagcaccaccaccatcaccatcaccaccagcatgacggtgactgttgttccggggaggccaaggggaatcatcctgccaaagccacctgatttaatggttggtttggttgctcatgatagaaagaattgatatggcttttagtttgaaaaaatagtaagctttggttgaattctgttgtgcaaacttgttgtagatttattgagtctcgttagacatgattttttgctttgctgtcttggttaatattgacactccttgaacaataacaagattgattgttgtgtttcagtgtctttattgttttgtcgctgggaattattttaactgttgttatgatggttgattacatttcaccatgacttggtggtgtgagcacagtagttaattgtaagcactatagattagtgtgtgtgtgtgtgtgtgtgtgtgtgtggagtggcatccagcttctgctggagctccatttgtgatgcaccacagtgccagcatagctgcggctttgtgatcttttatgccaccattgtagcagcgtgtctccacttgggcgatgcatgctgctacttgtaattaattactagggatgatagtaaatgaggatgaatatttacagtaccaagttacctattaatgaactgttattgccttgctttggatgaactgaatggtaaggatgattattttcatttctgatgcaaattggataaaaggatgttgataaagaaaagatagttacttctatttcttattggtgtgtgtttgcatcctatactcattttatttttgattatcaccaacacctacaaagaatgggaatttgcttctggatcattgttttattttacgagaagtatgaatatctttttaatcactggattctgacctggatgaattgttcatccttggatgtaatgtgttttatgcgattggtgcaatattaatgatatgcacagtgcagtaaaaattgagggtgggtgtgatgtctgaacagttaaagtatttcaaagtagataagttgctgcattattttggtatagagtttgattttcctctttgatgatacactgatggccaaaagtagaactgtgtagacatccagtttcttccgaagtttttattattttcttaattttcttatgtatttcatacattttgctttaatagtaatttataatataaatattagcaggtaatcagttctgcatttgcaattttatgaaatgttctttggcctgttctatatcctatctttgaatgcacgtgttctatatcaatgggatgcttgacccaatatggatatggtgtttgctttcgctctattttgatgcggcaaactctttcttgtgattgatctgctttatttatgaagctaatttgttgaggtgaacatctcagaattattggatggtttctcactcaatgtatactcaatggatgttatataaagtgatctagctttatttgatattaggggatatcactttttttcctttggtttgtctgctgcagctagctgattttttccacttaatacaaagcactaggcctacgtggctgtatgttatccctttgctaaatagttaaattttgaacaaacctaatgatttgcctagaggatgcatgttgggttagcatggtggcccatgattaacgtgacttaaatatgcaagagtctgcagcttatataggatgttatatgtcaagagttacgctgttactaatagcttaaacttagtataatggactttcttagttatatcattggtaacaaagttagccaacatgggtttgaattccaggttcgacttgtttctgatgatcttaaggttcagggcaaaccctctccaatagagaggggaatgacgtgttcaaaaagggtcgtgaaggtacattagagtctatgggttgggttcaaactagctgctcatgtttaatagcttgcctctatgctgggcatatatgtcaagagttatatcttagttaaacaacttgatgttttggcgtagtggtgagtgtttttgggcatatcacccaattttctcctaacttaatttgtttagctaattgttatctatccaatccaccaaatctcccacataaaacccagttggaacctggttaccagtaacacgatcccacagctttataatcgttgacagtccctcaggaagtgaataatcgtttctggatgaaccaagcaaactggacacagattagagtcacacatgtgacgtttgaaacgattaacatttgttagcaacatattcctggccaccaaccatatgtgcatttgaaccctctcagggaccttcaacctccaaatagccttatacaaccattgattcatactatctccttcttgaatcagagataagtacgcattctttgtagagaaactaccttccataaaacccctctagaccaccacatcattgccaaaatcaacattaggcacacacagcacggatcttgtgaacaatatccataggtaacaaagcattcaacctgcgataatcccaagtaccatcctcaccaacatagttagccaccatcttttgatttttcgaatccgcaatactactattaatagacaaagcaatactattcatacctggaatccacagatccaaccaaaatctcaccattctgccattatttaccttccaacgaagattgttatccacttttggccaaaccgcatttattccctgccaaagatttgatccccttttccctgcatcaattaagaggaatattgaggtgacctcaattatactttgatcggacctagcgaacccaaagagagtcggtatttttaactagatgccatccatttttcagcataaaagtttgatttaccacacgcatttctcttaagcccaactcaccattgatacatggttgataaatgataaatccgaatttgattttacttttatataagttttcatgtcatattaatgcattttgatatattttatttgacaaaacttatggtttagcgtaagtttgtgaaagatagatgtttaagaattttcataaaaaatagttaaacatcatgaatttgttgaagctaatcattcatgataattttgtacgaaggcgataattaatttaaatcatacttgataatattttttaattaaaaaaagatacaaggagaccctccccacaatattataaataaagaatgaggcttcttgttttatctttatttttaagttttatttttatttttttacaaatttgagaaaatcttgagggcttttgagagctgaagagtgtgaacaacatcactaggacgaattatgattatcgtttcttcttattgatgtctatgtttactttttatataattgaacggttagttttgctctgatgatggctagttagtcctcttagtccgaaagttatgatgtaattgtccaactgtatcactttcattgtttttaatgaaattcttcatggtttatgttaattaactttctttcttttaatatttatttgggacaagtcattctaatactcaatcgattgcatagtaatgatcatcgacatgtaattggtagatttatatagaaaatgttttgtaccaaattacatgatcaaactatttggataatctttatatattagttatctttaattaatcatccttaaaattgattttatcctttgacttaagttaatagatccatgataattggtgtattgatttaaggcaaagaacatcttcttaccttgatcataaactttagttgattttagaaattgataattaactagggggtgaaatttcattatgattaggattgagaaaaaattgatactaatgagtcataatcctgattattctttttttataattcaaaatctctctttatattattttatttgttatcttataaaaagcaaagtcataaaaatattttaataatctttcctgtgagtttaataatcatttgggtttgatatttggacttttaaattcattgttactattgtgtaggtatacttttccttgcgagagcttaagatattttacgcatcattagatatccttctaagaagccatatgcactctcctactttcatcaatatcaccccacacaaactgacgacatttctgatcaactgcatctcaaatagacttaggtagccaggcagattgcatcacatacgacgaaagtgcttgaagcacagatatagttctcacttccaagcaactcaaatgttcgttgactttctttatgatgaattggtatgtctgagtggtccctctattatgaaggataggaacccctagatatttacccaagtcttcagtacgttggtaccctaataattggctaatctcctcctttgcttgccatgcaacattttttgaaaaatatactctggtcttctcattgctgaccttctgaccagagctctcacagaacaaatttagaattgtcttgatagtctccacctgctcctttgtaatcactgcaaacaataaaatatcatctgcaaaacccaaatgagacaattttcggccacctctagaaagttgaattaatgggctcccaaaattcattctccacaacaacattaacaagttgaaaaaagttgctcgatacataaaacaaatatatgagggtaaaggatcctcttgtctaatacctctttatggttgaaaatcctccaaaacctctccattccacaacaccttcatctttggggacgatatgcagtgccaaataatatccactatatttgcaggaatttggatatcttccaaggtctccttcacgaatcttcaatcaagtctattatagactttctcaagatcaatcttgatgtttacccacccaacattacccttcttgtgcctcatcgaatggagcacctcctatgccacaaaaatattatttgaggcatgtctgtttggaacaaaactactttggaatggcaaaacaagacgaaacatcaagttccgcaatctactggcaacgattttagtcacaatcttatataccacattgcataaactaatgagtctgaaatccttcatccgatgcaccatgtcaacctttggaaataaggaaatgaaagtatcatttatctccttaattctactcggttcatcaaaaatatttagcacaaaagaatttcttaccacacgtcattggctttggtacaataaagcttgaagggttttatgatatattatatttttatagcgtttatgaataggtagttagtcattaaatccaaaagatatctttgttttttttttttcgatttatctttaggttcatttatcactaacttcaattaatttgaattaaatgtgctcctgttgatgttgagtagccattatgcaattggaaatggacatatgtagttggagaaaccaagtaagcaacgattagctaaagcctaagcataagtggacatgagtatctgggaccacttgattgacccattttggagggaccataccaaagtgaaattagggaatcaatgaaataatgtcaatttgtcttttgacaacactgcaatgagaaaattgctgaaaatacaagaaaaaaggacttgatagataaagttatggacaaaggtagaaaggatatccaacacataacatgtatttcacacgatgttgtttcaatgaaaataacactattgtcatctattactacatttaataataactagagaaatattattgtactttacacggagaacaaaagaaaattgttccaattagtacataattccatttttcaatgcaaataaaagaaattatgagatggaataaagcacaaagtgttcaaatctgtccaattcctgagctaatttaatatatattgagaaatttatagaagaaatgaataaaagatatcagattcaattttgatggattatttcattaatttcttctatatttcacttaattgtgtattattaatttgttaagaaactcttcaataacaactatttcaaaatattttgtttgatgtcatgataatatatacgagtaacagataataaaagctttttccactgaaccgaagtcagttgaaataaaactcgaagatattttatagatatttgaagatttttctcaagaaaagacatctttggattttttttttcagaattggatattttctaacattgttatctttattataatatagtaacttatttttttcataattataaaataaagagaattctgaagagattaataaaaattatgaaaatagtttatcttttttataaactcttacggtggatatgatatgaacttttgcagcatgcttacaaatctactcctatataatacatttaaatgatcattatattgattttaattcataaaaacatttaattcaattttattttttataagttgattttattcaaactcacttcataataacaattgaatattatgatattctaggcatgtctttcataaattaatatcagattatatcaacctttaattgagtaaaaagtaggaacagtttaacaaggaaataaggtatgcatattaggacgtattcctaatttaaggatggtttaataaaagtcggaagttttaaaatataccactacaaaaaaaaatggaatttctgacggccaaaattcgttggtaatatcaaaattccgtcggtaatttcaaattttctgatggacaaaaatctatcagtaaaacgttcattgcaaaattaatttatggatttttttgtccatcaaaaattcctgcggatccgtctgcaaggtcagcacaaatatatccgtcgataagttatgtccgaaattaccgacagattattcatttggtaatttttcatggatatatccgttggtaattttcaacagaaaaatcagtcgtaattttttatgagtccatctgtcggaaattattaacgaaaaaatccttcagaaattctgtcgaaagttacatatcaaacaactctttcaatacaatcgatcttcattcatacatttgctaattcagctaccaataattaataaccaagaattagtagtcattcatccatcattcacacaagtgttgttattgcacatgacaaaaaattaaatcatcatatttaccaccatcttcagatgaaataattatgaacacatgtaggattcataaattactcaatgcatgtaattctaataaatcaaagattacaaaaatgccttattcctgtatacagatcagttttcttatatatttcttatgatcattaatgcataaaatgtaatccggatattcttttctcacctccattatatttatcaacgtatcagaattgtaatcagtaaaaaatgaaacgctcccctcattttttccccttcttgttgaatttttgttaatttgagacttgctagttatattatatagacagccttgttaccaagccaggtcaagtctatatcatcatgcagtgcacggcaacaatgcgggaaacaagttgctccacgcaaccaaaacaaaacaataaatatctctgcaaaaatgttttctattagtaacaaagttgtcttaatttataaacaaacaaaatcaattatacaaaatattggattgagggattttgtgtataaataaattcataaaaagtatatatatgcactatgtaggcatatataattatatattctacaaaggtgagattggctggaaagatcacaatcacattacttttggtgtttgtaagggaatattacatttcaattttctttgcatacatacgtaaataatcaatacgtaagaaaatatttaaatatgtttctgggtcttaactgggtcttaaacaattttatgtacatgtacacttttaattattttcattaactactttcattttattaaacgatgacattttttttaattatcacatcatatcacttaatagaataataataatacaatttaaaatataaaaacaataaagagaaattttgtgtatatgatttaataattgaccctaaatcttgataaatgatgagaattgtattaatccttcaacaaacataaatatcgatgaaatgaaatatcaaaaataaaataaaaatcgtaggaactaaaatcaaaatcaattttttcagcaactaaaaacatttaagaggaatattacaaacataacttaatgcgctttgatccaattcatttaccaacctttatattatatgaatttacagtactctcattaaatataagaacatctttttattataattttttagaggataaaacatgactttaattatcataatttaatatttatgtatttttaaaattctcaaactattaaccattttaaaatttatttttatattaatagtttttatcctcaaatctcgactttaattactaacgggcagtatatgtttaatttaattatcttgaaaaatgtatcagtttgtatatgaggaatctatataatttgaacctaataattgtaattgaatgctttcattattactcacaataactcatatgatatgttccctctagtaatatgtataagtttaaatactcattttttaaaaattggataaaaatcacatttctttctttctcatataacattgatttttaggagtgttcaaattcaaataaactcaaaataaaaattgaaaattgttcaaaagatcaaaaatcgaaccaaattgatttttttggatgatttttactcaaactaattggtttgtagtatttttgaaattgatacaaaatgtaacacttatactaagacttatattttacttgagtttcataatattttgttgtgttatgtatacaaaatttatacaatacatattattttatttttcatactacttttttaagatatatttagtttaaaataaataaaattttaaaaattttattataaaagattaacatattaataagtttcgtaaattattatgaacaattttttaatgtaattttatttaaaatataaaaaatatatataaatattaatgaaataatattttagtaaaaattataaaacacaaaccaaatcaaccgtcaaaatattagtttataatttgatttgaattttattttaaataaaaacagaactaaatatatttttaagtttattttaaatgatttttaaataaaaatcaaaccaatcagactaatacgccagtcattctttctcatttctggcacatgatatatggtattctatatcaaatcaaattgttacagaattagttattcaacaaaagaagacttttatatgtctcttcatctttaacaagcttttaaatctcatacgcgctctcattcccccaacaactctccaatacaaatttacgacacatcaaatgaaactttacaccagaatcaacaactccactatttttaccaatattttcattttttttttaactttaggtatctccaaacttagtaagaaacaaatccctttaagattcatttaaagggtttaaactctaaaaaaaaaaactcatttttaatgaaaagcaaataaatatctcatagaaatttcacatatctttgatataatcattttgatacctaaaaatataagaaggtaacaaattattttaataagataaaaaatttaaatttaattttcgaatgaaaaaatgtgattaatcattttaacaataaattatattttttaaaaattagtttaacattaagttataaaatttaaaaattaatttactattatattatctacacaattaatctatcacactttatacatatttaaaaaaataaatttaaattttttaccttttagatatcaatttatcattatctcacaatttttgcaattcttgtaaccattaccaaattttaaatctggttatctacgattacaatttataacggaaactaaaaatcgggaacaagattggtggaattttttaatgagtgagagcaaagtgtcggaaggagcaggaattgagaaatgtgacaaaagtagagttcataaataaagtgctagcatttgtttacggttcaacggttcaacctattcatgggccagcaaacatccttgtctttgaagcatccaaagcatgcaaccctatctcaatattctatatataaacaaacaacagctcatactctttgtccaaaattacataatagagtgtgtgtttaagtttgatggaggagaagaagaagaacaagaagagcaagctgtggttgaagaaggtgtcgtggccgtttcggtggaaacgactggatcttcaaacgaccatcatggacaccgtcgttttcaagatactctacgcggctgaggctgtagtccttgtctccaccctctgtttcttttacctttgctgtggctgccacttctgaatcatcaccaccaccaccaccctttggcttgttccgtcagaaaatatgatttagctaatttcaccacaaaaaaagattttttattttttattttcttctccaataaaatatttatagaaaaaaattgtccaaatattgttatttcattcatttttttatcattactactttgcttcaattgtatttatttgtcgagagattctaattcagttagttagttgaacgtgtgtgaattgttgtaaatttttttatattatctttgattcctgaataaaaaaattatatttatttacagttcctgttttctcgttagtaatagaataggcatagaaattaagcttgcaatgatatcttttatgctttattacattatagatttcatctttttgcttaaccagcgtcaattccttcttgacactcccatcttgctctgttttataatttgaaagcttaattttctgcaccaaattggaagatatgagatgatgaacgatcatatattatatatataatttgacatatttgcacgtttataggttggaatgaataatttgaagagcataaaagatgaattctggagaacaattttccctagcattgcaattttggctcttcctcgtactttttttttccattgtataaaagagtgcgagaaactgtttggtgaactaatatgcttgaggtgatctgtctgctttttgtttatttactgggaggagaagactggtttctattattgtaaatgcaaaaattaccattttgagtgaaattacagttatggaactaccaattttacggggggaaaatgttcgttcagttatgaatttcaaggtcatggagtcccaaatctttttcacttctttgtagaaatagtagacatcaaagagttcattagataaagtatagataatggtgtgtctacatgtcttgttggcataagttcagtcttcaatttgtttaggattggcaaaagtggaaggccgtaaaagccgatgcaatttcatgcatgtttagaatggtatagatcaatagatgcattcttgtcacttgtagaagttctcaccagtaaaaagtttgatctttgacacgttaaaaggttaggtgatcgacatatgagtaggagcaatgggttttggtacataaggttagatgtgatctttgttagccatttaatttttctctaattaaagtcatcaaattcttatatatattcttacaaaaatttgcaaactgaatttcttaatgctatgtttggtttaatgttacaaaaatatttttacaaaattcaatacaaaaatatgcattttaatgtacacaatgagaaagacatattttagtctgtctgaaagatcgttcaaatacctctaaaggtacattggagtcaaaaaaatacgaagaacatgtttgtgaacccgttatttttaggttttatgattttcgaagtgtcatttcaaaagtaacgatttattagttaaaacaaacaaaaccatgagtattactttggaggaagcatgttcatgctaaaagtaccttaaactatcctaatttcaatcagacattaaatcattttaaacttactttcacttttttttttttttataacagcaaacttaaaaaaaaacttaaaagcttgctaatcaaaatatcacactttatccgtttatccaaaaatcaaaaaattataaacattttatcttcaacacttaaaaaaaatccatgttattaaaaagtgaggatactaaattttaaaaaaaaatcattaacaaaatcaaaatcacatgaatggtaagtaaattaaaaaaaaataatgagacacaatcacacaaaacaattacagaagcaagaagttacataaaacaaaagtaatagagtaactatcctatcctagtgtctactagactaaacgaccttcgtcgctcgctcgccaaaacgaaaatcacaatggcgtcaccagcgtcggcgaggacgccggtctctaccggcgcatctccgatgcaacgcctctccaccttcaaaaacccctcctccgccgccaccgccgccaccgccgccaccccctcctcctccgccctagactctctggcctcggatcccatcttctccgccttcctctccccttccttctcctccacctccttctcctccgccgcgctctcctccggctccccggcctccaccgcggagaagctccaccacgcaatccgcctcctggagaaccagctccgctcggaagtcctctcgcggcaccacgacctcctctcgcagctctcgtccctccaccacgcggaccacgccctctccaccctcagatccgcgctctcgtcgatccagtcctccgtccgtcgcctccgctccgagctctccgaccctcaccgctccgtcgccgccaaaaccgcccagctctacaacctccaccgcaccaccgagctcctccagcactccatccgcgccctccgcctttccaagaagctccgtgacctcatggccgccgccgaccccgaaaaactcgatctcgccaaggccgcccagctccacttcgagatcctcagcctctgcgacgagtacgacctcgccggcatcgacgccgtcgacgaagagctcaattgggtcagggaaacgggagatctgcttcgcagcgaggcgatgaaggttctggaacgcggaatggaagggttgaaccaggcagaggttgggaccgggttgcaggttttctacaatcttggggaattgaagggcactgtggagcaggtggtgaataagtataagggtttgggtgctaagagtgtcactgtggcgttggacatgaagaccatttcgggtggaagtgggtacggtcctggtgggattaggggctctggaacgccccacattggaggaggggctaaagctagagaggctctctggcataggttgggaaattgcatggatcagttgcattccattgctgttgctgtgtggcatttgcagagggtgctctctaaaaaacgtgatccctttacacatgttttgttgcttgatgaggtcattcaggtgaggctcattgtttttgttttagttgtttgtttacatcagaaggaaattatgttgttgcttccttggattcatatatgctcttctgcatccatcacacgacaatagaaattattgtttgtcctttgaacgccatagtttgatatgtagatgatagatagtattgtgtaacgacaaaataggaattggtttactttaccgacataattgtgtaacgaataccctgtggcttagctttagcttattatgcaaaatggccagccaaactttggtgtttgaatattagtttggaaattgttagcacaaacaggttatttttagtttttcacacgcgattttattagtgtattgagagctattattttgtgtgtcactcttcccaaatggaagaatctgaggattatattagaagcttgaattgagtcattaattgctagtttcggtacgtgtgttttcatttggttttgaagagactgacatgacaagatctatgaatctattgcactggtttaatagatctacaaatgttagagaccacaaggcaagactgtaatatttcaattttttagtatcaatcaagtatttgctgtgcaatacaaaccatttgccagccttccaaatctttcctttttgtggtcttcttttcctctggtatgctgtaaacagatgccaaggggtgacttgtgctatgctatattacctatgcataagtgaagagggagtaaggagatcaagggtaattgcttgttgtttctcttttgtgtagaattattttaataggcttccagctttatgcaacattatactgtcaaagacctttctctcttcaaaagagtagtataggatgcagagtagagaaattgtaaaagttcatgcctgtccattctcttctgatgcattaaacaccgctagatggattttggatgcaatgagatcaatatgcaatcttttgaaaatcatctcctctgtatgtattcagagtgtaataaagtgatcaatatgttagatgtatgaagaagttgcattgatttttttagtaaggtcttttatcctagattttggaaaaaattgtgatcttaaccatgtgcaaataaacagattcaatggacttcctatttcctagggatttgggtcttcatgatctattatactttacagtattgagttcttaccaaggaacactcatcagatcatacatattctaactactgttgttcgcactttcttattttctattggatttttttatctcatttttggatgttgcctgctgcggcataggaaggtgatcctatgctaacagatcgagtgtgggaggccattacaaaggcttttgcaagccaaatgaagtctgctttcactgcatcaagttttgttaaagagatttttacaatgggatatccaaagctttactccatgatagagaatctacttgaaagaatttcacatgacacagatgtcaaaggagtgttaccagctatcaattcgtctggaaaagagaagataatttcagctgtcgaaatattccagaatgcatttttggctcattgcttgagtcgcctttcagatctagtgaattctgtatttccaatgtccagtcgtggtagtgttccctccaaggaacaaatatcaagaattatatcacgcattcaggaagagatagaaactgttcagatggatgcacgcttaactcttcttgttttgcgtgaaattggcaaggttttaattcttcttgcagaacgagctgaataccaggtaaacagaaatgacgttattgtatctaaggcattgttgcttattagatgttttaagcgctacatttattggcttagaaacgaattcaatgctatctagatcatgggttttcaggatggcaggctataaagttagctgttatataactactaatatttttggaataaagaatattttattacaaggaaagaatggattcacagaagaaggaaagttttgttgactgcacagtaaatcatggcattgttaactgcatgcataaagaatatcgtgttctttcattgaggagtttatacttcatatgtgtattgtattattggacttgcactgtatcacattgtagtgatcagcaacggtcaatcatttaacttgcttgctcattttatttttcagtgtgttgagtaattaatatttttgctagacttatataatatttttccgatgttactacctgaagtgttgtcacttgtcatggtatggtgagacataatgactggagatagataattactacctgaagtgctgttgctgtatgttttatctggaacctaaaggctttgtttccccttcttcgtgtatgagttttgcaatatatagaatcccaaagtccattttattcaagtgaagggaggatgactactatagaagcatagtttctaatcttttaattgttcaatgtcattgttatgacagatatccactggtcctgaatcacgtcaagtaaatggtcccgcaacaccagcacagctcaagaactttacattatgtcagcatctgcaagatgttcatacacagatatcatctatacttaaaggaatgcccagtattgctgcagatgtgttgtctgcttcattaggtgccatatatggtgttgcctgtgattctgtaacagctttgttccaggcaatgctggatcgtcttgagtcttgcatattacaaatacatgatcataactttggagtgctcggaatggatgctgctatggacaacaatgcatcaccttacatggaggaactccagaagtgtattcttcactttcgcagtgagtttctttctaggttgttgccttccaggaattcaacagctcctggtacagagaacatatgcaccaggcttgtccagagcatggcttcacgtgttctagtattcttcatccgacacgcatctcttgtgaggccactttcagaatcaggcaagttgaggatggctagagatatggctgaattggagctagctgtgggccaaaatttgttccctgttgagcaactgggtgcaccatatcgtgcacttagagcatttcgtccgcttattttcttggaaacgtcccagcttgcatcatcaccacttcttcaagatctgccaccaaatgtcatacttcatcatctgtatacccgtgctcctgaagaattgcagtcaccgctgcaaaggaacaaactaacaccattgcagtattcactgtggctagattctcaatgggaggatcaaatctggaagggcatcaaagcaacacttgatgattatgctgcaaatgtgaggagcagaggagataaggagtttagccctgtttatcctcttatgcttcaattgggttcttctttgattgaaaaagatcagacttcctcaaagtcatgatccagtaaataatttgtagtctagcaaattaaaccacatctgctacttctcatattgcttcttgaaagttattgaaaagagtttgcttgtggaaacatgaggaagaggcctgctacttctgctagcaagcatgaggtacaaacatttaaatgatttaatatatttttttctttttttcatttctattcatcttcttccttccttccttcctttttttttttttttttttttcctttttaaatgaaattactgttattggttaatctcgaatttcttgattatttgttgttactcctcaatgtagagaaataaagccttttgatggaatgtagaaacaagtgttgtagtatactccccatgattaatagacatgtaaacgattatttcatcatgccttacgtatgtctgccaatatcttcatgtatagtgtaaactatctttatctaattattcattaatttatttttttcacaagtttgttgcagcttcgcaatattttatgtaattatttcacgttatgacttgtaatctctcttttttgttaaaattgaagtcttttatcttttatgtaaactagaagatcctatcaaggtatgatgggtaatataactgctatgctgtcaaataatgacggcaaatgaaatggttgttaagattttttatccgtaaaattgccaataatcataaaaattcgagtacctcagtctgtggacctgagggagttcaatattcacctgtgcataataaaaagtaacggcaaaaataaacctaacacgaaataagttggagaatttaaatttataaaagaagttaaatgttaaaatgaagcttaaaataaaattaaaagaaattgcgaaggaggcccgattaacattgaagggaaatcacgttgagagcttccatccaaatccttctaggatttatttgttttccttcataattcagaatcttcaaactcattcttcattgtcattttgagtttgaaacagtcttttatttgtcactattgatttactctgttgaaaatttacaatttaaaattgtcaactgcatgaattttggaaaaaaagacataccgtaaaggttccattgccgcccattttggaatcgctaatctgccaaacttaaggtttgcaatatgatctcattaatttgtattaaattcgtttttttaagatgtattatattcatttttaatttgtctgataatggcacttttataatcattgccaatgtatagctgtcctatgatttttgaagaaataaataagatttacttattaaaaaaacaaaattttctttttttataaaaataaaggtgaattagacaaacataaagaaacagaaaactagttattatattaaaaaaattaacaaataaatttaaatttaaataaacggggatatatgactatatcatctcatacacacactaatttcgaaatacaagtaaaggcaaaaaatagatgacacagagaaacagttaaaaatgaaagtagttaaaaatagacttgacagcgtccaaaggtgtagatcaaaattgataaggagtaacttgaattagtattgaaagcttatggtaatgtgttaatttgttgtctctcaccgcaggtaaggatttgaaggcagctctctgatcatcggtggtgttttgagtgattgacagttgacacgggcctgttaaaaggacgctatctcaaaatatattaatttaatttttttttttttttgaattggttgaagttagttcgaattgaaaaataataaattcaaaattcaaattaattgatttaatttgactttgatggtgggattcatgagataaatccgatccaataaacaccccacaaaaggtgatatacaacttagagtaccactgcgctggggctgttgcagacttcagagatgtgcctttatttcatacttggtatcaatacttattaatgaataatttttatttaatttttgtttagaatctcatgaatgaattaacatacatatcaaaatatttttaatctaagttaattagagttgatgatatatgaatccaatgataaatataaaaaaattaaaaaaaaaagaaaaaagaaataggagagagatgaaaaaggaaaatgactaaaaataatttttctaaaacatagaaataataatgagtctatttttcaacaaacttataatttttttttatttcatactaaaacacaatgttcgttaatctatataacactcagttaagtctttttaactatcttttttcagataaatttcaatctacctctatctctctttatatcaagatattagtaaaaaaaatcataaaaatgtttattttatttaaatgaacacttatttttattttttttaaaaaataagttcaaaaaacttttccattaaattttataagaacgatccaataataaaaaattacatttgacttaataaaaaatgatgaatgtattaattcaaaacttaaatccatattagcaatgtttttaaaattagttattaaattggtgaatgtgttaattcaaagtttactaatgcagttatgattaaattgtacatcaattagtaataatctatatattcagaaaaaaaagtaataatctatatattttaacagtgtacaacatattaagcaataaattagtataagatagtaaaaaattataaatttacataaaatgactatgttaaatataaagtaaacataagtgactaaataataataaacccataagacaaaagactgtagtaacttgacattgtttgtgtctttatttagtgaaagaaaaatatttttgaacggtggggatttagaagaatgatttttttgtggtcctacatagaactagaatcctccacagatattatttgtggcagggaagtgccgcccttggccaagtaaaatacctacctgaaactgcaaagctgaaaccaaaatgaatggcattagcaactaactccaaaaaacctcactttatggccatcaatctcagcagcactgcttctctccactccaagccttcttttctgacccataaacacaacaacctcatcaaattctaccatccttcttcctctttactcacaacatgtgctcaaacacaagggactgacactggagttacacaggaagatgcttctgctggtaatggtatatacgctaacaattcctacccactctttattattattactattattgaatcaaatatgggcttatggggataaccatgaatttccatatttgttgattaaccatatgtgtatgttaaaataattcatttaacggaagaatttatattttattaattctgtgtgtaaattttttttggatcaatgatttagtaattacgtgtcgtgagtatgattagtctctaaatcatgtgggttgaaagatatgcatgtctccgacccaatacaaaaaatattggttgttgatttatatattaaaaaatatattctttctttgatgatcccgaccacaaatatttagaaaagtgagaaattatgttagttatattttaatatttgttgcatccacatggttacaagtggaaaaatgaatcagaacttctattaaacttgaaatatttgtaggaaagtcatgtgtttgatttcttcactgtctcaaattttcttaattttttttatcttaccagtttaaatttctaccaaatacttctaaattttacaatatgaggttctcgttcatgtctgaacttggcttctggggactttgtgttgttaggatctttatcttcttctcgtgcacagctggatcttttggaacaacttacatctacaagctcacctaatagtggtacgtaagctaacatctcctctttaaatcaatgatatgtgtaggggagacagattagttgtcttctgtttttgtaaggccattttatcactgtgagaaaccccttctctgttttgttgttaacttgttagtttaaatgaaatatgctgaagatatagacatggctggagaatgtaattgttttaatacttttaatgggaaaaaaattgaaagcaagagtagtgcctttgaaatcacaagttacaagattatatgctgctgccatatcattaaaatttcaatgatactatgaaagagcttgcctttgatgttaccttatccttcccccttatggccgcatagtataaacatttagagtagaaacaataacgttggtatcacatagtactactcagcatagaccaaattcatggtagaatttgggtgttgtaatatgatttgttcatcaaagataatgtgtttagcagtagtagctgtatgggaggtaaatagctagcatgaaagtttgaaaattgagtaaatatttgactccgctaagataagaaaaaatgtaaagtgagaaagtaaggatgtatttatccttagtttgaagtggctcaagtttacaagttatttggattcaaatcaattgtaaatgcacccttaatttctcactttagaagagtaaagtccatatttttggtatgatcatatgtctatttctccccatcttgcataacttttgaaattctcccatgccttttatctctatgttatgaatcactcctgatatggatgtttgtctcatgagttatgtgaaagaatagaaattttatagccatgtctgtttataacctcttgtatttttttatttttttttcaatattgggaaaaggattacaaagattgaacctttctggtttataggttatgaaagtgatggaagcaaacttacaatccgagagcagctcgtgcagttatttggagaaaggaatgatgatttcaccatacccctaggtaaaaacttgaagaaagtgagtgcgaagttcttcaccatctcacaaaagagaaatatcaggagacaagcttacctcaatgaagtgtctcaaaggaatgattcagttttctttggaaccataggagcatttgtgattcttccaccttttataatactaggaatagctctattaaccggctatgtacagctttttccttgaaatactatagttagcgatacttcttaagtgatatatcaatgtgatactaatagaatttcttaccttatttgttttctcctgttttagtgatagggtgtctgtcttttcccctttggttagcaaattctttttattttgaaatgcttataaacactgacaaacaatgtcctcaaacattgaaaaaaacatcatggataatatattgatctatctccatgaagtattccagcgtccacatcaaggtttgaaaaaaatatcagaattgattgttaggagaatacaacaaaaaaaatgtatcttgcgggaagacattacaaagttttcaatgactgtaccttctctgaaaaaagacacccacacaaacatattttatcttagggaaagcaattgaggtccatctgtggtcttatgtgtttcaaatacttgcatccatggcaaggcattgattcatctttcttagcaagactcagccttcatgcctgcattcttgtcatttgaactagcttttttttctaatcaagtaggaatcagtagttagttgtcccaaatcactccttggttatgtatgcagacccatttttcttgaagaaggtagaatatcacaattaaagatatctgaacggtgaaaagtatattccaagttgttatgcttttggatattttttcttggtaggcttgtaaacctataaatacattcagcacacccagtaatgacactgcagttcccactatccagtgtgcatagaacctaagacttctttttttggatcccctgcgaagaacaagaaaacagttgtaccctaatcatcatgcttcgcaaacagaaatctgtagctgttaataaagctggctctctagaaaatatgaacatagaacatgaaaaatcttaataaatttaaaagagaagaaaagtttgactgcgttgtctaagtttggtatttagcaaatgctaaatggcctaatccaatatattgcatagattttcttaataacaagcaattcattggttcacctttgtggtcgaaaaataccatttagaacttgcagccagataataccatataatgctacccctaatctttgatgattattgctgaaggagttgttgaaattttttatggatatgattgttcctgcagtggcaagaagtacggcaagcttctgttgaacagaaatacaaaacgtgcatataattaataaaaaaggcaaggatcaatgcaagaaaagaaagctttaaaataaacctagttacttttgttaatagtagaggtacattcacttctggcctttttataagttgagctaaaacttgattaatgatacagacaacagcataattgcatagttcttttcacatgctctattaaaaaatgagacaaagaaagcttggaacttccaataaccaagaagattattttttaaagattcttttttgtcttcaaaccattcattatagtcctttccaatagacaaagatgcaatacccctcacttgaccttatgtagtgactaataagctttaggacaaacaaattaactgtgaaatgggaatcttgttattcttatctccattccaccatcattagaagttaattagtgggacaactgacccttctaaactaaactgaaacgatataaataattgtacaaatatgggttgccaagtaaagggaaaagaaacaaattaaatataccaaaaaaaaattgtgagctatgatttaaatttataattataatgtaactgatcggttttaggtttagatagattttcctgcaaaactgcatgaacataaaatataataataatccttctttgattcccctctctgttggacagtctgatgactagtataccaataggcattaagaacgccattgaagcccacaagagaaacccatgtagctagtgtgatttcgaactgaagtctagaactcatcttcatgcataaaacaaccacaataaaaaggtaacttcacaaacaaaacttaatagaggattataatagcaatgtagacaaggacaagaatatacaaaattataataccaacttaattgatcaaaattcgaaagaatacaatgcaggaatgaaataccttgatgttatggtcttttttgcttgaatgtctgcctttagctttcttgtgctcttgagatgcgctaacaaggagaaacatgataaaaacaatacttaattgaaagaggaaagcactgagtttttgctgaactctcattcttcttttgttgaaaatatgatgatggccaactcaatctccactgccagtgaataagacttcaaggcagaaacactgacattcttgaatttgtatgtgtttcttctcaagctggctaaggtaactacatgactctatatgtgtatgtgtgtttgaggattcatagcactcttacctttcttctcagattgcacaactaaaaagttgagaccaaatcaggagagaatgagaccaacttgaagcaaagagagaactcatcaataagccgaaaatagatagagttttaaccttcaaaattatatatttctgtttaaagttacaataatagactaaatagcactggttgttgcatgaaaaatgatggttatgaaagtggggtgttgggatatataatgaaatgagatttcaaacttgtggttgtggggttaacttccacaagctttttgtgtttatggtggagaatgtggagtttcagaaaaaagaaaaaagtatgtcagatttcgatggagggttctaaaagacaaagtgggtcgtggtagacttcccaggtaaacactatcttctgtttcccactgctcaacacacattattataagatgcttgaacaaaacattaaatgtaagtgaataaattcaaactctaccaaaggttatttcctttcttaaattttagacatggcattcttgttcgtatcaaatcacatttctttcatgcagcttcgaggttaatattttttcatattttaaacgaccaatccatctcaaggaaattatacatcagccctttctttgtgattacgcttaacatttcacataatttaaaattttgagccaaaacttcaacgttgtccctctaattattaccagacctgcaattagaagtttttcagtattctttttcctatatttttatctcatgcttgcatctgcatgacaatggtaggtcacaaatatgattatgggatatggaaaacactgtaaataagacagtcacaactcatataacctatttgtcattgtgagttaaaattatatctgcacttgcacactgggaatagaataatgaacaagtgttaatgctgaaccgtaaaaggtgtagatgcacgtggtccctcatgttaacccttcaccgttgcttatattagtttatttttacttttttttttattactaacttagttaattacttttatagcattcttcaatttgtgttccttagtaaatgtaaattcgcttacgagcgacaggataatcctgcgcagcaagtaataacatgtttagttcaagttaccaagtgagttttttttgtcatttaataaaaatcaaaagttaataaactaataatacaaaagctttttttaattacaccagtgagcaaattgaaacgatttaattttgactaagaccatgatgtagttcgtcatcaatcaggagtatgcacaagcacaaagtatacccgtttaattgtttaaaagaagttacacactaatcataagatacagatgaagagtgcgtaaatgtacgtaaaagaatcttaaaacaaatttataatagttatccagcctacaatattgattacttttaagataacttaaatccttgccatacaacttaacaaaatagtttattaaaatccaatattaatcatatattttaattattttacttaaaatttaacattaaatttcatgttcttacttctaccttaataagctagataataaatagtaatgaagtgaggccctactgtgaagtttaaaatgaaaaccgaagcggcaatgactgaattaacacatgccttgtttatctttcttccaaagaaatcaagtttattgacaaacaaaacttaggtgcagttgctaaggtgtttcatgttttctgcagtttcacttcagtaacataaatagtctgcattaaaaatcaatgtagaaatttgagatcaaagttcaatatgattttaaaaacacaaaaaacactcaaggttgtacacttaaagctttgtcctttataagccatgcttggtctaaaatatttattaccaaaaatcagagagaacatatcaactaacaagtgataaaccaaaagtaatcgctaaattcaaaagcaacctttatcgaatacatcagaatgagtaaaatagattactctgcaaaaatataaaattaaataaaacaccatcttccaaaaacaaaatcttcagagcttgaaagaatgcaaactatgttgcaggcaacgaagtttgtcactacatggatcacctctaagctcttcctatttatacttaatgaatcaacaagcagggaaattccatgaactgaatcacataaacaggtttggcctggatgccttgtatgttgtcttcagcttcctagttggaggcctaatcttcttgaacaccaatgggaatttgattttagaattgtggaactgcttggtgctctcccttttgcacagcttagctgggatggtggcagtcttaattatctgaatgcatggatgcctcaccctatgacgagatgccatttcagtgtacatatgctcaaccgcaccattcagagtagtatcccggtattccttgtacatattgtgataaccagtgcggctctgataacgcagccaaattccataattcttaatcttggtaggattcttctcaaaaatctgcaatcagtacaaacactcaaacctccatgtccattgtccaataagacagcaatgaacctagaatacaaatatttgttcaagtatttctttcctaaaagggctttcataagatcataattcaccaaatgtccaaacttcaaaacctttcacctcatttaccatttcctgtgtgctaatgttaggttgttagtcagaaataatgcaccatatgactcgagtacactccatttatctacagtcctacacctacgccactagattgcatcataccggtggcaaaaattgacaagaaaactatttgcttccatagtcaataaaaataaaaacagaaaaagagaaataatgtgatctacccaacagatagttaagcataaatgacttcccgtagtcaaatccacacctaacagggtctctacatgtggcattatgtctaccgttcttcaaatgtctacataacttaaacaaatttaatgcacaagttaagcccagccgtataatatttatatataaaaaaaaaaaaatcctctagaattcttcaacgtagaaatctagcctcattaaaatcattttaacaagtaactagcgctcaaaagtaattcattgtagtgcaataattgatatttctgagacgaacagaaacatactagtaaaattgagaagtgcacacctcattgatggctagcacttgtccattgcttttcttaaccttcttcaattttctcaaaaaatacctgaaacaattaacattaacattgtcaataataataacaataaatcagaaatagaaaagactgcattttattattgaattagtacgaatacgaataaataacatttgaaatagagatgaacaataaacataccagaacttggatttggcacggacctcgttggtggcccagagtttcatgcggtagatcttaggatgctcatcggaatgggtaggaagagcccttcccaccacctgatactggtgaaactgcttcaaccataatcacattcacatgttaaattacaccaactcacactgcaaactaaataaaacacaaaaaccattaacattaacattaacattacccaccctcatggcaaccatctccgccgatttcgattgcttccgtcaactgttgttccactgctacgagctaatcaacaaaggatcatatatgcaaactaaaaccctaatgggccggtgccttccttagttgggcccaacagaaaccccaggctcagattgaccattttttacatttgactaacactctcaacagtaaactttttttcctttcataaagccaattcaaattattatttttctaattctccaggggcatatgtatcattttccttagaaatcaatgaaaaaaaattacaatctaaaatcaatccaatattttttacacaaggtaaatttacaaatattattgagattgactgtttaatttatgtactatgacaattagaacttagaagtcattttaagttcagcttattttaaaaataaaaccgtatcttttacaaattttctataaaggatttatagaaaaaatcatctctttaaaaacgcatccaaaccaaacatgtgcttcatcttttttttttttttttttttaatgaaatgtgcttcatgtgttattaaataagttattatggaggtcatattataccttaaaaacaaccttatcatgtagacaagtcagattcatattttatcttataaagtctaacctatttattttcacatttgtcttgtgtattgagtagtcgtgattttaatttttacagtttataatttttttaaaataaaataagcttttaaataaaataataaattgcaagttaggtttttaaaaatatcaagtctaaaaatagattacttgggcctcttttgaatttcttgggcagacctatttaagtatgacaataattcataaacatctaacatttatatgacacctcctagtgagaaaaaagagtgtatatatgatatttcttttacatgtcaaatgatataatataaaagaaaaaaatattaataaattatttgatatacaagtgttcatatataattacttatttaaaatatgcaaataacacactttaaatccgtggtccacaatacccacacgggagcatatgcaaactatacactttaaatccgtcctctatattgtggactcaccaacctccaccatccactattgttgattgagaaataatatttgtataacaactcattcaacaaatagtacaaaagaaaaagaattgtaaaatataatgaataatgtcatagagagagttgtatgagtggttgtaacttgtaagtgtatcacaattcacgtgcaactattaaaaaaaaaaaaaagtctttgaactaaaaaagtaggctctcaaggttgacttttttataaataaaaaaattaatttcatcattaagaatccagttaaaaaaaattacatgattaagaccaaagtttaaaaataaagacctacttaaaaatcccaaatagttgaagtctttaagaatcaactaagaaatttaacctaagttttaccactaacttatttttaaacttaaaacactaaaaaacaaatcaaatcattttaaatttcatttcatttcaaattaattttgtaaaattaattttatttaaaatcaacttcactaaaaaaaaataatttcgcaaatagctcactctaacatacccttaatatattcgctcatttttttttgtcaccattggtcatagacacagttatattatgaccactctctgtaagcaaatctatattaacaaggtgcataaatttattaaaattttcattgaaaattctttcacctaattgatgtcacactctaacaaaatatgctcagggtaaaacacggctctcgagttgaaaataatacccacttaattcatatcttaaccttaggtttgaatatgaccaaaaaaagaataaactaataactatagtcctgtactacttttttttttttttacaaaatagtcctgtactcctgttgcttggaatttggaggaaaataaatatatgataatagtctacgatgattattcactcaaaacttaaatataggcttcatagttcatactggttgccgatgcagaactatgaaaaagaataaaatgtaccagaacatttatggaagtaggcaaactgcaaattttacgtttaagtatacagaccaattcagcaaaggacgacagtcaaataattgtatttgtactcatcttattaaacagaagcttacacataaaacttatatttttttaatgagaaacttataaaatctacattgatggagctatttcctcttcggaaattcctataaacattaccatttactataacggcataataaggaaaaacgtctctcacaatataaaacaaaagaacaaaataaggatataaaaagactctattttaagggtaaaaaagtataactcttagcaaaagaaaaaaacaaagaaagaaatgagagagctagattgtagtaataatacacttacaataaatgcttataacacttataatttgttttttttatcacataacttgtcttatttaattctttggttacagagatacatccttgggcagaaggattgtgatccctaatacttttcccttttttccccccttttcttgtaaactgtaaaatttatcatataaaattgacgtgtaggtagtattattctttagattaatgtcaaagtacctaggccaacaatagagttgacctattctttggtccatttttcttataaagttggcagtgtatcctaacagaaaagccatggaataatacactgatgcgacatatgggaaacgaccatgtccatgtgccatttgatttatttttcatttaaaagtattttaaaagaggaaataagtataaattttaaaggatgtagtctacaagaaagtaggatagtaacaatgagcaaaccacgaactgttattgcccccttgacttggagactcaggatacagaacttcattgctaagtttctttatttcttgtgtgtgtgcatatatatatatatatatatatatatatatatatatatatatatacacacacacatatacggagcaattttcctttgagaataatgaatatacaaaacaataacatgtccagaatgatagtaagagagaacatcatatattcatatatagaaagaacaaatattaaaattaaatgagacaagctcaaaattgagcagttaaaatgtgtataaaacaaatgtttatgtttgtaatgattcagttttctgtaattacctggaacctagttctataatcaactttgaattatttatttatttttggtgtatatcactttccaatttctacctaagggaaaaccaaaaaatctaccccctgactcaccatgtttacaattatgagactatacagtatacacctttcaagtttcaaccccaaaaaatgttaaacatcagcacacttcattggtgcatagccaagtctggatttcttcatatcatatagtatgtggaaattctgctgctgatagtttccaattattgaaagggcagatcgaggattccccaaaatagccaaacaaacaacatcaggatcaatatggataaaataattctccactggaaaattccacactgctccatcagcaaacaagattccaaagtcaggtagctccatcttttcaattccagacacattgtagcatggctttagaggaggaaggccttcaacaagttcatagccgttaattttcctcacaaaagcctccttgataatctcataagcaggctcagcaaaatatgttaaagtggtgccagaatcaattatggtaccaccagcaccttctgaagacaaatgccaagtctcctcaggtatcttcagcacctcatcatcaaccataacagaatttatctggacatagtaaaatgtgtcaactgaaccatctttcccaccaccaaaagaagtgaaattcaaattggggtggctgaggagctccttgtcctcaccaaaaatcaacttgctgctaacacttgcattgctattcctatccacaagacaataggaaaaagattgaccatagagagattgcatttgagaagcaaatgacaatgatcctttccccaatcctagcaaaccagaagcaccatgaaacaggcctctattccaatgaccacatccaaacatcacattctccacatgcttcaactctgacttcccattaggagtggtgagattaacagtgaaagtctccaatgcaaaatccccagttgtattggaaccatccccataccaataaaagtagggacaactctgattctcagccttgcaaggattaggtggatccggggatgaaaccaattggcaccggggatcatgacagcttatattcctaaaagaactagaatctttggggtcataatatggcccactttgctcaaaacatgcaatgcaaggaacacattgaatccaattaaggtcactaccagtgtcaagtatcagagaaaaatgcttagggggtgtccccacaaacacatccatgaagtactcaccagagccaagactcacccctgattccaaggttgccacaagctgcccggaaactggactagtcggtgaagcaaccggagcaaccactggcttgaaggactgctttggttgctccttctgtaacctctgcagccttgaaatggtgttttggttgttcttttctatgacccttctgtgaaggttctgaattctggtgaaatctcttactgtggaatcaatcacagactttttaggctcagcacctttgctccctgatctgtgtttcaagtggagtttcaccgaattcttgtgtggttttggtgctggaaaagcctcactctcttcatcagtttcttcacctgatgtcctggtaggtacagaatgcccaagttgctcagaatatgagaagctacaatcattgtccccagaagaagagacatcattgaaacttggatgatcaggaaactttatggcagccagagaagatccatttttgttgatattgttgtgattgtgattcctagaaatggcttccacaacacaggagcatatcacaagcagaaccacaatgagagaaaccttcaaaaccatagtaacgatgatatcttctttcttggacccaatgaaaatccaagatcaagcacctaacagaatttcagggagaaaatttatttctttatggaaatttctgagcttagccaagagggtcaaagaaagaactgagttcacaagtttatctcaaaggtaatcaatcagaagcaaaatcttaaaacaagaggaaaatgaatgaagatgagggattggcaaagtaaatggaaatgaagaaaaaaaaatgtgaacttatgagttttgaggccaaaacattggttttggcagatgggaattgtttttgacggagagaaggaagaaagaaggattgaaaagcaaggtggtgtgactttattagtaacaacgaatgagaaagacttggaagcctaatgtcaaaggttgatcccaacaacgcggttttattcacaataaagccttagtattttatgggttttggtgatcagcattctgagtttctctcgttgattaagaaattaaaattaaaaatatttattatataaatcataaaaaattataagaaaatttatggatgatataattttttgtctatccattttttttccaaattggaatattttaaagagatatatgaaattatattggtatttgcccctattttgattttaaattctttaaccaatgttattaaagcactaattattatttatcatattttatcagcccttaaaatgaattataaagtttctaataaaagagattgtgtagaattttcattttggaaaaccatttttaaaaataaagaaaacatatagtacttatttgaagtgaatttctcatcacggatagcattatttcaaactatttacacctccgagttaggattacatacagtacttcaaaagaagagacttaggattacattccgagttttttagtgtgtttttatttaagttgaaaatatgatgtgtgcactctatgtaaatttaatggataaaagtaagttaaaagtaaaaataagagtgatgatacttctacaaatctaggtttgcaatcttctattcaaagacacacttattttacctaagatgtatatggtgtgcatcaatcttaacacctaaaattgttgctttgcgtctttttatactaattttagaaacaatttttaaaattcaatatatatgagacattacattttgtatgacaaatctttttgatatattatctgttgagattgtgtcacgcagtgatttaaaataaaaaatttgatatataattactatcttaaatttaatacaaaaaattatcagaaattcaaaataattatcttagagataaatcatatttaagtctaaataataaatgatgtttggtctggtattgttatcacaggattttcctctctggttcctgcttccttggcttgtgattgtgtcacagatattacttttgcctcgcaaggctgcaactagcaaaagtcaaagacatggtgtttgataaatcatgatccaaaaaaacaaaattggagctgtcagagttttgaaccagtcgtcatgtattgaacggaacatggagaaagacaaatccacctttgtgacttaaataatgaaaactaatgctaaagaatttgttgacaaagtaaataatagtgattcaggagaatgagatcattatcgacccctttttatcgggtttgaatttgtattttaaaaagtgtagctaataatgtgccaagtagaggccaaagggagggccccaaagatgtgtaattttcttgcttagttcctcatggtaattttttaaaactatttcttaataaaaacgtatttttagtaaacgattcctttattattattttttgttggtttttttctattaggtatatagttttttgtttttgtttttgtttgattcttttaaatattacaagtatatcatttattgctttttaaatatcattattttatttaattatttcaaataataaaatttaaaaaatcttgatatttaaaaggttcaagagaaaacaataaatggaaaatttattgtatacaaaaaatatattttatacaggtatatgtaggaaaaaatttaaataaaacattttctagtaacagtaagtttctcttaaaaagatcatttgaaagataggtaaaaaaaattatttaatttcaacatactattaatttttatatcgttatcaaatcgtgtaacattaaattattaaaatctttattatcacaaacttgaaaaatatattcttcaaaattttattttatacaagttgtatctactaacatatcattatcttagtgaaatgatctgaaaagagaaaattaaggatgcaataattaatgtgatgtaaaagaaaagagagtaaatggaatatattgctatgggtgtggctgcacacctaggcagttttctggttggagcatgtgaatacgtgattatggtgtcgtaacgtgcaaaatgggttcctggaactgattgtgaataccccagaaatctcaatcactaggcaaataagtgtgaaggaacattgagatcatagaaaaattagcatagttgttgaaattcgatgcaaacatacgtgccaagaatcaacaacaaattagtgtcttttttccttatccgggccggggtaggaagaggttactagtactttgaaaagtgatagactcttccatttattaattcttggattttactgtaccatgttgtaatctttcttccacgtgatacttcctcactccgaatacagaaaaaaaaaatgtttatgctgtataacttccaagttttttcatatatcgatcagatagatgtgcactataacatgactcgtgtgggtttgagtgtcacaaagcttaaaatgaaagaaaaatatacacgaaatcatttcgctagtgggtagtgacactttccgtgaagaattaaataaaagaaatctaactgtacgattattgtcttctctagtttttcacttgtgacttgcactgacaatagtggtttgtggaacctttagccaaaaccacgtcttattcgacgtccacacccaacccaattactttctactttatgttgatttattattgttgtagatttcttgtactaattgtagtgttgtattaatggtacaggctatactatatattattttcttaataaaatcttttctataaaaaaatactaccatcatacctagacattaatctaattggtgactattattatagatatgtttggataagtttatttagaaacatttataaagaaaatgagatgaactttttcataaataaaaataaatttttcattagctaatttttaaaaatacatcaatataacttctctaaaagatgagatgacatctacaaataagctaatgaaaaactcattttaattcataaaaaaattcatttcatttttttctttttattttcttttaaaaatattctaagaaaacttaacagttaaaatgtagactttacgccgaaacctattcacccatttcattttttgtttatgccgaatcctattcacccatttcattttttgtgcattaagaagtctaatagtagaatcaaacacccacaacatgaataatgaatatcacctgatctcatttgtcaaagcatattgtatttgcttggactatgaaaattgccattctatctatctatgtgtagacaacacgagcaatgtctgtctttcttctactctatcttattcttatcacgtatttgaatgagtccgctattaaccgttgttttgaagtcgttttctagttttattcataaatggaaaatttatcaaaatattacatcagcttatctggaacagaagaacacatgataacgcaattaatatttatcacccttctgaactagttcgaagatttttttttttattgtataaaaaattgtaatttatcacaacttaaatttacctctatctattcaatcaactctttatgtcctaaagttacggcagttaaaattagtcaacaaactaaatttatttcatttttatcctataaatacgatcaatacttgtttaatttccatttctttccatcattaaattgaattgcccaactagagactatagtttcagttaactctatcgttctcgtatacagcacatgacccagagaattgacatcttgaacatcaacttcagttattagaatgtaagtggcactcaaagctgcagcagtcactactatttcaagaaaaaaaaaatccaaatatggcaaggttaagaactcgtccctgtacatagtttggtcagcacaatcagcggagaataaggtggaaattttgcaagattatagccaattttttaaaaagcatgtcaattctaccatggaaatgattagattagatataagtgattaatatacctaaattaagattgaatcatttggatattattcggatttagttttgacaaaaataattattaaccaaattttatttatcttttggttaaattttgaattagtcaaaatctttctcttcatgaacaggataattatcaaaaaaaaattggaagcattgagttggaggtataatatgttagattgatattttattcatattgtaaacttaatatttttatgctttattttttgtcactatttaattagtatgatatatttattaactttaaaaataactaatctttattaagaatttaattgaccacctatacatggatcttttttatcaactatatttttttaattcacaaaacttagacttgaaatctgattaaaatataagcctagttccattaatatattggtatcagtatgttttcttgaacgaaatctatttctccagcttaaataatcttttagtcccgtcaaaacatgatatttttttaatcatttaaatattttttgtttgattttagttcttgtattttttttgttttaatttttgttatcaagtgataacatgacaacttattaaattatcacgtcatcaaataaggaatttgataaaataattaatgtactttttttcttgaatgactgtcaacgtcagatcaattaatgttaattcacaacaaaatttaaaaaatgactaaaatcgaaacaaaagtatttaaagaactaaacaaaataacattgatagtatttatattttaaattaggtaaatagttatttttgtccataaatgtgtaaagtgctaagaaattcgtcctgaaagatgaaaatttaaattttagtcaccgaaactaaaaaaagtgtaataaatccatccatatattaattttcgtccgttacagttaatgaaagaatctacttaacacatttaaaggtgaatttatcaacgctttacatattgagagacgaaaatgactatttatccaaaatataatttaatttttatcttttttttaattgttccaagcataacattataataagcacttaaaaaatagaaaagcaatcataagttagaataaacataataatattaattaataagcataatatatctgttgctctgaaatctcaataccttacccaaaaatgagattcaaacaaaaatgcttgtttaatctaagcatttttgtttgagtctcattttttgataagatactgtcacaatagaaatttcagaacaatatacagattatgtttattctaacttatttttgtttttttaagtgtttattgtactattagacttgcaacgattaaaaaaggaggggagatgaagattaaattatattttagataaataactatttttgtttctaaatatataaagtattgacaaatttgtctctaatgtgccatgctctttcattagccatatttttatcttttgagacgaatttataattcctctatagacatgaaaataactatttatccatgaagaaagaccttgaagccctggccatcgcacctattcgtggcggtacttgggtgcttgatgtccacccccatttgaatgaagaaagggagggaattattggttagtagttacagaacccttcaccaaacacagattgcccccactcagttccagcaaacgatgtcgcattccgatccttcaaacagatactcctacacccccactctaaactggaacactcaagttcaccagtatttcctcaaagcctacggcgccgaccacttctctcgcatctccaccgcgctaacgtacgcactacgcaccctcttcccatttccctcaaagcctattattttggttgcaacttttaattttgattgagctttcgaattcgcaggcgcccttctcgctactcctgcatccgagtcaacacgctcaggtccaccggcgacgccgtcatcgacaagttacggtcgctcgtgccgaatgctgacgtggcatcggcgcaatccgattccggagatgacgtggcgaatccgttgaaggagtgttcggctgctgctgctgctgatccaatttccaagtgtcagattcctggacttgattatgtggtgtttgtttggggttcgggaccgcaccccatcgtgtaccgcgatgagcctccgaaggaagtcattgttagtaggaagtgtgctgaggcagttcttcgaggtgctcaggttagtgaatagtaatatctttgccaattgccaaattctatgttgtgtttgggagattacagattatggtgaagaatttgattggctcctaatgttagttttgcttttaggtgtatgttcctggtgtgatggcttgcagtgctcatgttgagaaaggagatacagttgcggtttcggttgctgtggagaagcagggtgctgatggaggatgggggattgctatgacgcgtggcactgttctccaaggatctgagacaggtaacaattgtgtgtttgtgtctgaatgctgtagatgtttaggtagactttaattttaaacttgccaatcagatacgtaattgcttaacctgaaaaaccatcagtggataattggatagccatccgggagatgaaattgtattttcaaagagacatggtaacattttctaataatagagtttgaaatagtaagacatgagtggattcttctttgtagaaaacaagcaaaggatgttttgtttgtaatcaaaatggtttgtttaggaggaggataaatgtttctgttgaagtaaagttttggaatatggttgataggattttgtatttttcttgttttacagatccttattattttgaacgaaatgggatttatattgggcaaggaacagcaatgttgtcaagggctgggatgttccgagtttctgaaggagttggtgtggatatgaaggatagagtatatgaactgcactatgtttactttgctctgttggtttttcccttttcattgctgttttactattgttcttattttaagaaggattgaggattccttatcctctcatctctttgtaattttttttccctttatatagattctttttttatactcagatccacaaaagggtgagcggatactagatatgtgtgctgcacctggagggaaaacaactgcaattgcaatacttatgaaggacgaaggagagatcattgcaacagatagatctcataataaggtgaatattctgaactctagtgcattggaattatacattgaatcacactaatcgaatcgcttttattgtctaacattctgttttatgttgaaagtagtgtttgctaaatgcaaagatcgaagaaacttattcttatattttcaagatgaaagagaaaaacatcagctgaaaagaaagaactgtgaatcattgtttgtctctgttgcatgagcctcatcatcatagtatcatttagtgttaaaaaatggtctggaaagtgaataatgatgtcaaatattatgcttgattagatttattgaatttctgttggctcatttcttctgtgctatggtttgtcactttcctgttttatattttgttatatacacaataagcatttctgtatcaacattttacaaatgcatttttaaataatttttaaaggtaaaggcaaaaaaacacatggaggagcttatgttagaaaagctgacatccggaagaacatgcgaagagcacaaaatggacctggaagaaatcagtgtgtgggtggtagggttgatcgttcaaaaggtttttctcctgacagttttgacagagttcttcttgatgctccctgttctgcccttggtttaaggcctcgattgtttgctggagaggtagaagtggatctgtgtattgaaatttatcctgcatttacttgaatttacacacacatgcttagaccaatctagatttattggtgcaaatatagataggatacggggactactggcttatcttaaaatgaaattgtgttctcatttttcttttcttgatttataccaccattagtttttactactaaatcctgcacaaataagtgtatatcttaacctttgcctgaaacacaggaatgtgtagaagcaatggttatttcaatgtgattggggaaaaaaattattctatggtaagttcacccttttttgcccagaaagtgtaatttgtgaaattgtcagcatgaattatatattggtcaatgtgatgcatagtcatcatctctgggtggttaagttagtttttattgttcatttttatataaaaaaatttaacccacaaaaaagttgcttaaaaaaaaaaaaagaggaataaccatgcaatgccatttgtttttggcaggaaacaattcaatctttaagaaatcatgcaaaatatcagagaaggatgtttgaccaggctgttcaattagttcgacctggaggagtaattgtctattccacgtaagtatgcatttttgttgatcacatttttctgtgcatgctcacaagttttctattacaacatgtgatcatgtttctttcctttcactttctctcataccaaacaaccaaaaaaataatctcactttccattctttttcttcccttcgcctttctttcctttcactttcttacctaaactaaacatgacattagtaattttgaaatgtatttgtaatggtctgaaatatattttatttagtgtctaagttgcttcttcggaatctgcttccagccaaacagcttaatacaagaaagatttaagagattttttgttttcaattatcaagaagtttgttttgtacctaagctgcctcaaaccattatgttatctttggatgggcacttctgaagttttattttaccccgttttatttgagacgtttctttaacactgatttgttgatggctattgtcttataacagttgtacgattaatcctggtgagaatgaagcattagttcgatatgctttggataaatacaaatatctgtcattggcaccacaggtttgatgctaattctttgcagtccgaatttcctatttttattcttttgaattgattaggcttcaatatttctcgggctgaattactatcttgattatatatgtaattaattgaaggatgatccctcttacaatttataaataagatgggtaagtggtgactacaaacaaattttgatgtttagtttttctgtaatgaattattagttcacttggttgagttattcggatttactatttgattacccaagaattggaggaccgggtctagttggtagctgtgaatttcctgatggatatatagagtaagcccttcatccatttgtccatgattgtgcatttttatctctcccttacatagatgatcttgtatacacactcatctgtgatgctgtttattattgtttgtggacataccttttatttctttttatccaaaataataaataaaaaaattcagtgccaatttttggtttcacaccatgatatctatgcagggagtggttacgaccaggggaggaagaccttgttcagaggtttgatccatcatctccccttgatacaattggattttttattgccaaatttctcgcggggtctaaagatacctgacaactattcatgaggtgttggcgtggatatatgtttacttcataattgccactgaaggaagccatcaattttttttttatgattggcctctggaaacagtctgagagcttcacatatgtccatttggaaaatgaattaagaaaatttcaacaatcaagatggacggcgaataagttgacaactattcatgatgttatgtactgtagctcccattttgcatctgtgcatgtacccatgtattgtaaacttattgagttaatttgtttaaatttatttgttaaaaatacttatttttaataaaataagtagttttttttgtttttttcgtatgtttatttaaatcttttctgtttaaaaaaaatattttttttttgtttattttgaaaagaaaatcttatatgcttattgaataacttttttttaaagtaattattttaaaaatatttattttaagtttaaactattgtaactcatttgaaactcattgagcgtaactttacgtgtgtaatagataactaatgtgattagatggaacactcgagtcatacataattaagatacagagcgtacatatatatttcggcaattcccaagccttattactgtttttcaatgttagatataatatttctttgtgcttcaaactttttaaatatgggaaaagtgcctaagtaattatcaacttgtcaatattttttatgttcatcaaatacgttgttaataacttcttcacatttatcgtgagtctaacaacttctctgataactcacctcaatccttcccaaataatgtcaaccaaacgctactacaaaaatttaaagggtaaggataataagatttaaaaattcaaaaccattaaaaaaaatcacaaaataggcatttatgcaaccttacaatgatgtaattgagtaatcaattcagaggtttaatccattcagagatttaatccaattgattgactatgcatgagtttgttctaaacttcctgatactagaggttgactcatccctttgaaccactgaataatcctgattcatatagttatcacattatcaattctacatagccaaataggtcctaatatgtagatattgtcctgaatgaggcatcaaagcaaggtccctctattttactattactttgtaagcattcatcttatttctcaactatcatgcagaatatagaatgaaagagatggaaaaaataaggaaagcataaatggataattaattaacgtagacatgctgcaagtaatttggaaatcgactctttaaactaattattataactctttttctttcacttatgtcttaatagaatttgacccaaacagcatttacacatgtagttctgctaacttggtcttcaatttacgaattactaaccagattctttcacacatgagctattttagccccttttcccctcttctcttctagagctagctaaaggtaaactttaatatgcacctaaatatcataatcttcccacagaaaaccataacttgcctcattagagacaagcccatcacaaatttgagagtaacattcttcattagcataaccaaaatccaccatcccaacaatgtcatctgaaaaccaattcattctcacatcattcagtggattagttggctccatcatattgagccactcaaagtcatggcacccatacttctccaaacagttctgctgctgctgctgctgctgctgcttctgttcttgctccctatctatcatgtcaggatgagcattgttttcttctacggattctactatgcattctactttaccatgatccttattatcatccttgccctcttgatcttcttctagcaattctcttaggatggccgcatcaatttcaaagacctccaaatctatctcttctaagttcatatcattgttgtcatataaggccataatatatatatatatatatatatatatatatatatatatatatggaagagtggggaatgaagcagaggaaaatgaggcaattaactggtttacaaaatgagaaggttattatcttacatattttgaaaggatgtatatatgttacacatatatatacacacccaacaatgataagcaggcggtaaaagtggccatgacatgaaaattacatttacctaatattgcggaatcaaatgctgatgcaaattgaaaaggggactgaacataccaattaagatgagaaggttctaaatgtgtagatgtacttatctactagaatacggcattaatcagtcacaggaagtgacaagaggcaggtatgaaaggtttcgtggttcacgattttcattgccatggatggagaaggcaaaaccaaagcaaaggatatgcctctaataaataatatttggccaacaatatctaaatgtaggtacatatttagagagtgtgtggttgtcgtctagctaattgctatgccatggtgggagtttgattgccacatttactagaatatcatgttacgtgtatttctttggcatcttagtttggtgcaacgtatgctattagatatgattgtcattttccagtaatatatcccacctcgtgacttgtttggtttcctttatctcctttctgctcttctacgggtcttcggtttaggagaaatgcttccataaataaaaaccagacacatatatagtaaagaacatttacatgatgtataaagttgtattgcatttacgcctattctaatataaacaattctgctttaaaaattaaaaaaccatgaataactatagataactttatcgtgaatgtatttctttttccaatttagtgacgatctcactgtgtcattcacaataattttttaaagggatttgtaacatattccaagtgaaatttggggttaattaaccccatatacaagatgttttatgtaattaaaaaaaggatttctttaactgaccccaaatgaaaatggggttaagcaactccgtctttgatgagcaatagaaattacacaattatcttaagttttcaattttatcattaatgttataactatcatatttaatgtattacattaattttatttatgtgtaagattaaaaatttataattattaattaaaattatattaaaatacataaatatatgtaaacaagttataaaatattgaaattttaataattatttttaattaattataaaaatctatattttttattcactttagataactaattttcatttattttaactttaaaaaagtaatctacatttttaaaattgattgaaatatataaaaaaaactttaggtaatctcattttgcatatagataaagttaagttttatatatttcaataaattaaattttttttctttctaaaattaaaatatatgaaaactatttacctaaagtttttttatgataactatttacctaaagtgaataaagaacatagttttctttataaataattaaaatactaattattaagattttaatattttataattttattacatatattcatgtattttattataattttaattatttcttttaattaataattataaagttttaattttatgcataagaaaaatatacatgatatgaaagagaattaaagataatgcattaaatctgatagtcataacactaatgatagacaaaatctttaaatacttacagtttgaagtacatttttaaattaaattctcacattatctaattataaaaaataaagaaaatcagtttgaaccctttttcaaatgccttttttatttttttatcttaaaatatttttaaaattaacatattaatactcacatataatatttatatatggattgttattatttaactttttaatacatatttttcttgtaatggaaactaattttcttaaataataaaatagaacagaacaattataaactaattataactccttaaacaactaaaaaataattcaaactcaattaattaaaagcagaaaacaaatagaaaagtaaagatacactggcataaagttatattagttaatcataattcaaactcaattaattaaaagcaagaaaacaaatagaaaagtaaagatatacaggcataaagttatattagttaatctctactactgattcagttcttggtaaactaccaagttctattaacttttcacaagttacaagtattcggtctcttacaaattaaactctatcccaagtttgatcaacacccaatattctttgttttattaagttattgttggctgtaaacaaatcagaaaaaatttatgatcgaagattgttcgaagactaaaatagaatcgtcttatagacgcataaataaaaacaacacttagtctttttctctcatgatattcaaggtgttttgagagtttttttttttttaatcttacaatataatataaagagagtcttgttgaaggagaaaagaataaaaaaatttgtgtgagatcaattgcttcagtcttcaaaccttcttgtttatataggccctatctttctttaagtatctgttgtctcataacggagaaatcttcatttgatcttcgtttaataaaagaggatggttaggtgaatttaatgcaaatccttttcttacatataaatctttgtttaaggtttgtgtgtacgagaaattgcaagtaggtactgttataattttacctttatatttatttataactaattaaataattaagactcttgatttatttttaatacataaacgcagcaattatagaataatcttaaataaaatagaacaattataaaaatatgtaaataataaatttaatgttaaaatctgttttatcaagtttgttcattttcatggaaaccaattttattaaataataagatattattttaattatgtaaaaatatatattattttcattatgttcaataataataaaaacaggatttttatttatgtaattaataagggtcgaattttggtttggataattattcgcaaaaaaatggtatcatacctaacttatcccatccctaaacaaattaacacctatcataaaatgtaaatataaaatttcgtatttcttatattttataattaatatttaaataatatacttttaaattttttaaaattcagttaaatattatacttttaattaatattttattagttaattttaatattaaataagatttttatttactgatttgttaaaaattatacattaaaactaaaaaacattgttctagccacaaattacttccaaatctagggtttcaggggcatattacatatatattagagtatatatagatgtgtgtgtctgggatgatcggtcacacacacatgtagctatatcaatatgcacgtacggttgcgtaatattttatactcatttcacttagttttttttctctttcttgcaagagtataaacttaatagaaatgttgataaagtccacacagaaggcgtagttttgttttaacaaatatctatgagtgttataaatctcttttgatcattgtgcttttcttttttcctttattaaatcaattgatataaaagatcccatatggataggacaaccagtacggttgagcatcaaattgataaactgatcagtatggccttctttcgatctggagcagaaacaacagtgatattgggaatatttatatcacaatgaaagtggaaatgccaagttttataagaaaaagtataattaataaaaatcctacctggtttagtagtttgagccgtgcaaactacttcctaatcaacaaaatcatgcatgccgtcaaagttggatattattgctctcggtgtttttttttttttgaagagagaataggaatatattattataaatcagaggataaaagctgtacgtacataagataaaactaaaaggtccaattgttttgggacctcatctacccaaaatgtatctcccaattgaaagccaatttggctaattcatgtgccactttattccccttctttttgtaaaaactaaggcactattactttcttcttcttttttatatcaaggcactattactaagatacttgcaatctgcaacaattcctgcaaaataacttttgttatttaatttgtatttggactattcctgctattcacaagctgaaagcaatcagactcaaaaatcacattggtgatcaaataaaattctgcagcaagcttcggttcaaaaaccatgtcaagtttcctcgtgagcatgttgaaggttctaacatatcttctttttttttacaatgatcgtactgatgtttaaatctatgacctcagacatattatttcaaaggtccaagccctccaccactaagccgacgacctagtgattctaggctctaacatatcaaaaaccaaggccctcaatcttcttctgtttggtcagttttcctccctaacttaatcaatggacttttcttccttctgtgtcaccttctctcggtgattaatgtgctgctcaaaatttttaatagccatgccacattaaaaaggaatatatatgacatatctatattaaataattaaaatgccctaagttatagataacgaatttgaatcaaatattggtcagtgaattttatttcggatatgttaactgatcagatgtttcctttttttattctaaatgaatatctaattaagatttagaaccaaatcctctattgtggattctacaagtgagttttgatattgactttttgaagacaaatgaatacacgcgatgtctagaaataactaatgagaatcctaattttaattaattgaaactttgaaacaaaaatgtatatatatatatatatatatatatatatatatatatatgacgggttaatttggtgcaagccattcataatgtatcatcatattggtcggattatttggctatattaagtactctgttaatatctgtactaattaggtattaatacatttttttattttaacaagcatattatcgtaattcctttactaatattaattgtttcaatatatttcatattaattatattaatatgacacaggtatggtgagggtggtagcaacaaaaaggccataatgaaaataataacaataataatgatagtagtaaaaacaaccacaatgagaataaccaaaacaagtgcataactatggaggtggtgtgaataataaagatgataatgataatgaaaatgaagacaatagtaataatactggtgccaatgagtgcgatgatttggtggtaataataaaaaaatgtaataataataacgatgatgccgacaacattgacaactatgagggaggagataagaaataaaaaaatataattattaaatgagaagtaaaataagtatttttttatcttttaagtatttatacttgaaacaaaacattgtcatgatttatcaacaaaatatgatagttttgtcctagtcatttttacttgattgtattatctcattatctatttttaaaatgaaacaagaaacttttatatttatattatccaataccatacgttttaataaatcaaataaatttatgcatagaaatttaccaaccatacccttactattttttttttaaaaaatgaaaacattaacaagttataattatgatcaccttaaaatacacccaatatgaactttgctagagtactccaacaaaacaaatgggtttatgtcaacaaatccttgaaatgcacctatttcatgtgagaaggaacactttagcaaattacaacttaaatacacctaagatatatataagttgttaatgtgctgtttctaaaacacatgcaattggatgtacgtttgaatctcattaaatgtcttatatttattaacatatattaattactgtaataaaataatatgtagattcattgtatttattaaatgcaacaataaatgtataaaaaaccgttcactttttatttaacaatactttttaatatgtatagattgacaaatactaatgttaaccaattatcttaattagtatattagttaaaaaatttaaagtgaaaatatttttattgagagatgaaaaattgtgttgttcatgatcatttttgctcccttttataatttttacactaaatattttttattttattttcttaaccaataccccaaggacaatggttaacaagacttatataaattatgagaaaattcatacatttaataaatatatattgtattttttaaatctaataaatattttgtattgaataaagttaaatttaattaattatctatcatatttaatatatatatatatattaattacttgttagaaccctttcattaaaagaaaataaaagacacaaatgaagaatatctcttttaaaattacctacattaacttaatccctcctcatattataacattaaatactttattactagttctcaaatatagtttacctatatataaatatatctagaaaaattggtagataagtttttacattatcaattaattaaaaaacatattgtatcccttgaaataaacataatcttttctaacattattatgattcgagtagaattagatttggaccctttgagtaaaatcttatgtttaagtctttgagtggaaaaaaaatataattaggagaaaaaaattcattaaaaatagtcagatttctaagtagatgttattagcaagaaaaaataatttggagaaaatgaagagggggggggggggggggggagttgtgtttagttttccactataaagaaagaaagaaaaagaagaaaaagttgaatgcacagcgagcaagtaataaaattgattatttattttctattaacatgtttgagaatgggtcctaattaagagaaaatgaaaaacaagacatcatggatgtaatttgctagatacaattcttggaagccttgtgaagaatggctttgaagttgtgaagatcatatatgattctgaggagtccttgctggtatcccaactcatctgcagactgatcaagcaactcaacaatggttggatgctgaatcgctttgatggatacccaaatcttctccacgttgtgtccccctttgcccactagcactggaacataccctttgcgaccttcttccatttcgatcgatcttccctgcaattgctttctcttacagaagactatgtattaatatatatagggctcttcactggttggatgagattaattaacctaaataagtccttgcggcatgcaattggcatttaattccttaccatttaatatatctgccaagtagcatgcttgagtcacgctatttaattttcatcaagtacatatacagaaagtacagagtgacgaaagattattattattattattattattattattattattattattattattattattgatgttgttgacggttgaatttttatttatcatatcataactatgaagtatcaactgactttgttaataatcattttttatcatgaaatctaactaaatatttttagtgattttttttttttgttctttagtccacagtgctttaatataaaatatttgcttaaagaattagagtgtaattttattttaatcatgttgataatgtattgagtttgttaatgcaaggaatgaatttattaaggtttaaaaatttattcttatgcatatgaattttggtgtgtaatatttacaagttaattatatttttttaaagtattcttaaatattatttatgttcagataagtaataacatctttttttttatgttcctataataagatatggaaaatttatatcataagagtatatgtacagaaaagttttatttttattttcaaatctaattatactttatatatatatttctattattatattttattttcattattttgaatttaaacattttaaaaaatattaaaatttaatcaaacatacttttgaatttagtcaaaaaaaaattgttatagtatttctgaaaacatcatcccttataatacaatattaatatagcttgaaacatgcatacaccagcttggactttaaatcaaacaaggttaggtttgttttgtaatctatcaattattttaataatgaagtcatacttctatgatcaaaacataagggtatttcatggtccttgtcacaatcactaagatattgacagatatatactcgatctctcaaattgatttgccatgccaataaactaatttatatatcaacttccgaaccacatatggggtagcaagcatgcctacgcgcagaaaagtaacctccttatgcttccttttcggtcttttatttgatttgggcggggctaattaattattaattatttaagaagattttttttttttaaaatcaagaaagaaattacttctactgtaaaatggaaaaattgtgtattattattattactaatattattgaattaattcaaagcaacccttgaattttagcatttatgcttaattaattgtttttacacatgaaagagttattctccaactatgctaaaggtgtacaagagttaagatatatactaacaaagctttcaaaaaggaagtgaccacgccttgcagttgcaggagtaagtctacgctcaaactatgaaaataataataataataaaataacaaaagacggaaaatcgggtgacctgattctcttaaggagaccacaaattctatatagcaaaaactcgattttcatccattgtcatgcccgaattcaatagtgctttgtaaacaatccagataaataaaaaaaactgagttctacgtagtcttttaatactatattaggaaaatttctccctagataaaacgagtaaaccaagatcggtcatgggcaaattcaataacatctaagggaaggatcaaatgccagcaaatttttacacatatacttttatattaataagttacaaaattatatattctgaaactaaataaaatttacctatatagttgaaaagcaactgcaaagtgttacggttatgatctaataaaggttagaatgatttttttcttaattaggccatgaatgtggctatataaaacatttaaaaataagaagaaagccaagaaaacatctatacaactataaaggataaggcataagactgagggaggtgaagagctatgctagggttcctgctaagagttctaaggaagaagaggaagactcttttaactatagtaccaaaaaggttaagactaaggaaggttcgattacgatagatgaggttattactgagggcatctacaaagacaatatgtagaaagataaggttccaaagtcctatttggataccttgttagaggctgaaaaagagattgtggcaaacttccagagctttgtagatgatatggaacgtaacactcatagggtagatgttacaaggtaattaggagtatgacaataataatgatgctacaaagctataactatgtccaataataattcctatctcgaaggaagaatttgaataatgtgtgaccgccggaagaactctcatattgttgatgccttgggaagaaagatagttttaattatgattgaacacaagctacccaaagaatgggctaaaatgggaactatacgcattatcaatatgtcgcaagactactactaactagtttaattagttctcggtaaagaaggattaatggcatgtcctatttgaaggaccatggatttttttttttttttgtcagcaaaattactattatataaccaaaaagggtataagagatgcccatttatatattacatgacatatatttccttaaaacaagtgacccctctaatggttatatcatatttagcagactttgatgtttatatctacattctaggtctttccattgaattatatgaggataagttcttatgtggtaagcaggtccaaagctgggaaccattttaaaaatcgatatgctaactttatacactccagagggagattttgcagaatctatgttgaaattgacctaggaagaaagctagaatatatcgtgaatcaatgtcttgggttagattctaaaattgaaatacgaagggcttcactcaatatattttaattatggcaagtacgatcataaagaacccggccaatccatttttagaaaatatattatactaccttcattgaaagtaattaaaaatactacttaaatactattttttttttcaattttccaaatggtcaagaagattataggaattggaagagagaaatatatattaaatacatgtatatggagttcaattattcaaaagatactttttcaacaaataactaataaatgatattcagataaaatatattattttcttttcgtctaaaaccttggcacaaatctaagctaggatccaatgaaaagaaaaaagatctaataaaaaaaaaaaaaacttttgttttctaacagtttgagggatgaaagtggattcaccaatgtagtgaagcaacattagggattgaacaaacaacaattaaatgtcccaacacaatcaccagcaggaagctaccatgaaagctatgaaggtggagaaaaggaaaatcatactcatataagccctaaacaaattaatgagtcgcaaattgtggctaatcaatttgttcaagataaggcgggattatacggtccatggatggtagttaaaaagggtaaaaatgtgtctaagacaccaaggggcacaaaaatcaatgttaaagttttgaaagccattaatgcgaagctcctaaaaaaaacagatcgaaaaggggaaaccagattaagattcaaaattgaatcagtaccaagatgtcacgtttattgcaaatgatagctataataattttgtattcattgcaaatgtgatagccagaataattctacaattgatagacatatggtgtttaaagtttgaaacaatcataggggagaacatccccaaatgcctcgtggaaaaggattacctaggtaacaaatcgggtgttaaaaaatttatttatgattccaaaggtaaagaccaaaatggaggcgcattgaaatcaaaacaaaagcaagtattctatgggtggattccaattcaatggacaaccaggataatggagtgagacctaagataaatattaagaaaaaaaattctttaaatgagaaaattatatgttaagtccttttatgtaacttttttgttaaaatatgtgatattttttgttttataaaaattaataataattttatttttgttagttagttgatttactctttggttgatatgtttcctagacttccatgtatatgagaaagaaaaaggagcaagctattggcatcttgcatgcaacaaaatgggtccgcgaaagccaaaaggggaccatgaaattggataaaaatcttatcactcacgtggtgtttcccaatgcggagacaagggctttcattaaagcaatgcaactagggtcattagggtacttcgagctcatcccaagagaactcatttgtcgtaaggaaacctccaattctagagacactagggtaggcacacatggcctcaatacagttattttgtcttcctttattgcttaaaaccctctaataaccatttttcttaatgaacgtccttcgttggaattgtaagggtacaagaggtataaagcttttcatcctaatgaaagttgtgctggaggaatataatgttggtattttgtgtcttcttaagacatatgcaagtggtgagaaggctaagaaaactattcgagggatcaaccctgacaagtctttcgttgttcactcactcctagggctaagtagaaggaatttggtgcctctaggattcctcataggggaacatggatattcttgtaattaattaatatctgcatatgagagtaaacaacaagtctagtgcctagtttcttatgacagtctatgccaatccacatcctatttaaaggatatccttatggacaacaagcctagtaaacaacaatctgttattatatattatcatgatcaattagaacatttttggatagataacataaacaatttattattaaggtgatttacttttgataatattttttcttaatttaaatatacacttatattagtctacaaaaatgtttaactgtttcattaattaattaaattcaatatcaacaataaattgacatatcagtactataagtaaaaatattatttttgggtaaattacaaaacatgtctgattaaaattttatatttatgagagaatttcaataattcaattcataaaagaaaaaaaaagaataaaaggaaaagatggaaaagaaaaataaatagacatgatgaattgtgccaaatactttttatatgttactggcataatcgattccagtattctaagggtgagttaaaaaccttaaatatatgcaaatactgctgcactgtcatagtctcatgactcaagattacaagcttatgatgcataaacataacttactattttgttcacctactcgtacagaaatccgttgtcgtccagcggttaggatatctggctttcacccaggagacccgggttcgattcccggcaacggaaaaatcatttaaaattatgtattttatttgttttgtaaaaatcttgtaattttttctgtgatatatataacgagtcatagtcatgactacttatcccattcatagcatatttaccagaagctctctgcactattgttggtagcatcaaaactagttaaaattaatgtgaaaattatatactttgtgtcatgtgtggctcttagttgaaatattcaccaggaacccaagttcccgcagtattttgaagactactactactcagtggattcaggtaaacaacattccaaccattaacaagcgaaacttgtattgtattgcttctcattacatatctaagacttttggtctaaacactgcagttcctactcacttggatccagttttatatattgtatcagatttttctactggtgtaatggtctttgatttgtctctgcaggaactgagtttgacaatgccacttcaaatgaggattttctcattttacttgctgaaatttttccttcaggaattttgtgatcttagggtgtcttgctgttggagagcaccatattattgtacacttccatggttgtgtgaaggaacaaatattgtggcattgtaattcagttgaaaatcgagttacattggatcattgttatatatttagcttctcttcctttggatgagaacttggattcactacaaaaacacatttgaactatgcaaggttcaaaaccatattccttatcatttctgtgtcaggaaaacttgtgatatcataagaatcactacatctagaaagtttagttaggattgttgcttgttgcaattaaatgcattaaacttcagtttggtgcgtatcttacgcaacatcatgtggatagcgattaatgaatagaacttacttttttttcttctaaaaaattatgttaaatagcatgaaaccgacattattatgagttataatcatcatatactcattatctttttcatttcactttcatttttttttctttccattatattatttattacatctgtcattttctttctctgtatcgtttcctttcactcatacactcaaaaaagttcatccttttcatattattatgctgttatacatagtcagttatctgatatgatgttgcaaaaagtgggatgctgtggaacagggagagattcaagatgagttactcatggaatcccccaaagtgcacttcacaagcagagaggcagataaagttgtggttggggacgcctcgtatccgtcagaggaaacaaatcaagtaatctctcaaagtatttaatagaaaaatactatccatcaaagtttaagtttctatgatttcattttcatacaagggaagacactatccttgtaattctattatgtattatagagtataaacaccctatgccacatcgattcctcattaatcatttcaataaaggagtatttgtgttcttccaatgtgcttacgcagttcttttagcttccaaagtcttctcatattcttcaatggatttgaaaagctcggaaaaattacctttcccaaaacccccacatgcgcccttctggtacaccttcccttcctcatcctccaccatgcacccaatcctctgaattatctctatgaatatcgttggcctgtcaattcaacacaaaacacatttaactaatcaccatcctccaacacaccaactgtaaaattgttaatctaacttttaccactttcaatcagttcaaagcggaagataaataaattcaagatataattgcaattttatctaacaatttttcaatgtcataaactttttatctcatgaaagggacataagtacaatttggagaggggaaacactctgatgaactgctacatcaagtacatccattctgacataacactccactgtaccatcatttgtgaattattgaaagttaattaatagaatataattgtacaacaaaaattttaaaaaaatgaaaatcaaattaaaaaaaaaaaaaaaaagctaacaaagtaggagaataaaaggaacagtttaatgtaaattaagagtgattagttcagtgatagttgaagatttgagttataataaagttgtttagcagggataaaaaagagaaatgtaaataaaaagaagcagaaaatgaggaacctgtcgccaacaggcttagtgaaaatctgaagaagagtgccctgatcatctctgtcaacaagaatcccaagctcctcacagtgtttaatctggtcaacggtcaacacatcagcggcgcgcttgtggaggttggcgtaataggtgggaggaggagaaggcatgaactcaaatccaccaaggaaacttcgctttctcatctctctcagtgtggtgaagatgtcgtgagtaacaagcgcaaggtgctgcacaccagcaccttcgttgtgttccaaatacgtctcaatctggctcttccgcttcgttccgtaaaccggctcgttcagcggcagcaacaccgtctccgagttgttcgccagaaccaccgagttcaacccgctctcgctcgttcccacgtcctccgcggtgaactccgcgaactcgtggaatccggtgaagcctttcaggtacctcacagccggcgcgagctccggaacgttcccgacggcgtggtccagccgccggatcccgtagtccagctccggaaacgacgacgacgacgccgcggcctcgaatcccggcaggaaccaccgcgacggatctgcgtgtggcgcctgcggcgcggcgtccttgtagctgacgtagcggagcaccacgtcgccgtagaggcgcacctccgcgaagccggtgcggccgtcgaggagcactggcggagacgccggctcggcgccgttcgcgacgctggcgctgaaggcggcttccgcgtcggcgacttccaaggcgatggcgcggacgccgaagccgtgtttggcagcgaaggcaaggcaggtggcggcgtcgaaagtgggaatggcggcggtggaggcaccagcggaggcggcggagagagagggagagtaaggagcggagaagaggaaggagaggtcgccggagcggaggaggtaggaggcgtggatttggtttccggtggagagatcggattttgctacaataggcattccaagtccccaagagaatcggcaagcggcgttggtagcatcggtgcaccagaactcgatgtggtggaagcggttaacttgaaagcggtccgatttaggattggttcggacgaagtttttgaaaccaaggagctgaaaggcagtttgattgcacatggtattggaattgggtaatggcattggtgcggtgctggttctgaggttgaggttgaggtgggtggttgtgatatataaggggaatgggagtgtgattggagagtgatggagtgggcattgcgtttgggttgagaataggtggatgaggatgaggatgaggacgaggacgaggaagtgaagatagagaagaaatggaaatagattacgacactgtttcaacgtggatggattggatgatgttgatctacctttcctcgtttcgaactcttatttttgttattattacatggcaatcacctacacctacagcgttactcttacttacattcgacattcatcattcatcattcaacctacgtcaaatccacgtaggattcgactctctcttcttcacacgcttctcttggctttatcacacccttttcttctagaattgtttttttttttttattatttaaaattattatatatttggtatatatatgacactatatacatggcactgtatatgattttgggtacccatttgtgtctttcttttgctaattaataaaaaatattttgcatataagtaataatacagtacttttataattaattgagaaatatgaattatatttatattttttgaagtatattaatatattaaaatatactcatctagtaaattagtatatattctctttatagaaagattgccgttttaaaaaattaatgtgttgctattcttttcagcaaataaagattcgcgcgtactaattaaaatattatggacgacttgaagtaggttgggtccgatgtactttttttattagtagtaagtagtcaatttagtctttaaatttacatattcatgtcactttagttcctaaagttaagaactcaaataaatcccaacaatgtgtttttgggattcatttgtgtgtaaaaagaaaggaaataaagataagaaaatttaagagaacagttaaatgaaataagataagaaaaattaaaagaattgctgtgtaaaaaatattatcaaaaatacgttatttatacactaaaatttcaaacattaatgcactgtataacgttaaaattgtgtcttgaacttgaagctacacatcgttattcgttaaaatattttaacattataattccatatttccaaagcaatactgcaatctaatgtttttttttaagagatgcgatctactgttaataattcataatgaaaggaatgtaaaaatgaaatgtacaaaagagtcagttgctagcagaaataatctaataaacaaatgagtcccacagtttttctctaatggtacaaatgtctaattgaaattttctgtaagaattttaaaataaatcattagatactcttaatttgaaagaaatataaattttattaactatattatactttcataattaatattatctcattccatgtagcggagatttcaatacataagaataagaaaaaatatctaatcttttaaaatgataaataatttaattgtcgttcgtatgtccattacatgaacggttgtcctctataaagggaagagagaacaaaatatctccaaggtttatgccaccgtacatcttggctacggttacaattggaaacaaaatgactacagctattgaatgataattacagaagatcaggggtcactattgtacgtaaatttaattaaataagcttatatagataaaattaggtataaactataaagaacaatcaaaacacactaacaagaggatcatcctcatcttgaggattggagagccaaaatatgtttctgaaatgaagctgcagcttcttccctttcttctaattgccccactttgtcatataccatggccatcagatagaaagcttcagctgccagttcatgaaactgcaagaaaatcaaatcttaaataaaaagcaatagaaagggatttgggtgttgaagagttgtttaaaataatgtgggttaaatgagtcaattttactatgaaatttttttactagttgacttgtgagctttcaccatcacaacataaatcttgaatgtattaagaccccataaaaccaatttgataaacacttatctagtatctatatgcccgaatataatgtatgcctctgcttttggtttgcactggattttcattgtaacagtcatccctacttcattttacgctttacacacacacaatactctagtatctatcacatgcatgcaatcatgtatccaagtgaactttgacgggaggcagagatgcagcaaaaaggcttacaaatgaaaagggaccaatgaaaactgttcggaagcttgtaattatgtaatatagtgttaaagaagtattgtaaattagggatattatgagtagtataattatatgacaattctctactgtattcgtggttctaattacaaataagagcctccactgtgtagtcaagacacacagattcattcacatgacctctcatttttcttcctctcacaagggatttctcaaaatattaaaaggcagaaagtttgcttacctccaaaagttggagttcttcagatgcttgtctcaatgaatctatcacaatctcataattttcaaagactgaaaaagaaattcaaatcagacaagtaagattcagttaaagccccaacaaggggatagaaaaaggaccaacaccctcagaaaactattgacgaaaatgtggggaaactagtttccccctatttgattattatcttttaaagaatcagaaattcggctattgtattgaaatacttgcaaaaacagcatatgtttaaatatacatggatagacaacaaatttgaagagcatagtctaacatcaactatttacagcgacataccattgaagtttgaatcacacagatagcattttgcttcaacaatataggcacgtgagcggagttccaaaccaccatgaccaagaatcattgggaaagctccatggataaggtttagagcccttgttgcatggcttgatccaagagagagccacaactcagctagagtaagtgtggctgaagcttttagaaggtccaagttaaatgagaggcaaaatgagaggcttgctaaagcatatggaagaccaagaactgcattgcctgatttctgataaaaacaaatgaatgaaggctttaaagtaaaaaataaaaaacagtagagaacacaacaatgtgaaagctagggttgggacaatgtagtagattgccggtaatttaggatgagacatagatcaagcataaaaagaaaagaaaaaaaaatgatcatacagataaagcaaaatgaaataaaagtgtttgatagttgatccacaccacatgaaactaacaagtgtgttagacaatatgataatttaccttgtgaatctcagcaagtaaaagaagaactgaagcattctcaacttgaagattgtatttgtagcacatacagaagagggagtgtgccacagaagctgcctaaaagaatcattatatgaaaattaaaagcaatctatacattttttaattgttcaactgttaggtaacagtgattgatttcacccttttgtctccttatggggcaaggaagctaagatccccacatactgtactttaatacataacaataacagcattgcatacagcatgcttgaaatctacaaatcctatgctgttgtcaaatgatacatgtttccaacaaaagaacaatttcaagaatcgaactgtgaatagtgtgtgattgattttctgtatatagtttaatatttagtacatagaagaagactaaaaaaaacctctctgaattgatttgctgcaaccaatgtacgagcatggcgaaggcttgcttctgtctttagttccatatctacaccagttactcgtgatgccaaaacaccaagttcatcacacagtttctgggctagctttaattgtccactacatgatgctcaattaagtgagctgaaattgcagatgctaacacaattcaagattcttaatacaacaaatgaactaggtaacttaccgatgtaaagcatgctcatgaagcagctgcaactttagcagtaagatttgcgattttgagacagatagaaacttctcttctgctattttaagggcgaaaaaggcctctagaaacagagaaaaaggaagaagtcagaacaataaggaactcgaatgggtgatagtggacatttctatccactatcaacaatctcgatgaagaaaatgacaactctgtattaacaaaatgcaatttgcacagcaaataattgccattaagctgaatttatcatattattttttataaaaagttactctggcgacttacaaactattagcaaaagtacaaaaacaagataaaacaaatgcaaatatgaaaacaatcacatacaatattttaaaaaatggtggaattctattcaattttatgcaaccaatctgacctttgtatcctttaaatactgctaaatgttgaatgagctttacatatgctaatgctgcatctgatgagctggggaaaccaaaagataattcaacagaaaattttaacaaaatggtgccgatacagttatttttcataataaacaaaggtgataataacaacttagaatgtgatctctgtaatatattcagctcagaaactaccttgatgcatcagcaaagcgagttgcatgcaccagcgcatttatgcgagacagcggtgagctaatgacaattggaaaagaaaaaaaaatcagattgtgaaatacatacagcaaactttcaagatattaaaaaaccacaaaaattagcattatatgcatatgaaacaagaaatatatctttaatcaccccaagtgatgaaaaataattaaaacaaaacaaatatgtaaaaactgcaaagataaagcatgcaatctgcctttttatttataaacataactttggtaaaatacaaccagggcttaaagaattttggtcaagatggagcctagtgtacccttatgatttatccagctgtgtttgaaaaccatagttcacctgattaaaccctaaaatagaaaaaaatgggtgaaatttgcttctgaatgtttggtaagcaagaccttaatagcaactaaaatgttttacttttactgatgaattataaatagaaatgactgctaatttattttaaaaatataaattacagagatatgtgtgtgtatgtgtctgaatctctctctctctctctctctctctctctctctctctcgtattttgtcttcaattaaagtggataattttcctcttttaaactttggttccataaaaaggaaaaatagtcacttcccagaagcttgacatgaagaactacacagaatggcacaataccattaaaatgtttttgatgggtactgagaaagaaaatcatttgacagaaaatcaatccaagattaagaaaatagttacaatagaagagagactgcaaggataatgtctttccaaaaattcattcaggccatgattgttgttcatcttttgcattcattaccacacttgcactcacccatacataaatgctccaataaaaccagctatgtcatttcttagcagagggtgtgcttgtgtgtaacatctttccaatttattagtttctttattatatatttattccaagttttggccctatttttatatccccacttccattttttacattcaagcattgtgacccatgaataatctttcccacctttcccaacaattgatatggctaacacagccaataagtctcaacctataattatattgcaaagggaaggagtggttgctgttgccaaataaataacagttacattcaaggttttaacataatagaacattgatatatggattaaaattcagtaaaagttagactctcattttaaaaacagcaaaaaaaaaaaaaaaaatacaagaaaagaaatgccagcttgttacagcaagtttttttttttcttttattaataggttagccttaaagcaatggaattttaatcaattataccatgttagttggcaatttccaaaagaaagatagaacaataattagtgtaaccttaattcataatttcatataaacatatctcaacacaaatagcaactttacctgccatataactcccatgcagttgcacgaagtatataagacgaacccaatacttgcaacacagatccaggaattgaggttggttgtgcaatgaattgggaagcattagaactattgccagatccattctcttgacacaaaacaagagaacccgtcggcttttgtaaattcctaagccaagctgtactaaaggcaccatcaattgtcattgcagaactctcatagctaaaatcactaataagatgagaactcaaccgaatttcctgccagccatataagaagaaaatagattaagcaaagaatttaattcgtgtgttctgaaactgtcaccaaagaataatcacaaagatttctacaaccttgcaaacattaactgggcaagtactgagcttcatggaagtttttggaccaaatgatagcaagggccgctggacatgctgcaatcaagatattaccatgatgtaaatggcataagacaaatttcaagtttcattactcactaacaggacttaagatctaatttaagttggtagagcttgaaataagttatataagaaaaataatgatgatatgtaaggtacatggactatggattcaactttaacaaatgagatcctaaaaattattagaattacggtcatatttcaagacacacctaaaccatgcaacatcgagtatgatctatctgatccctaattttcatcttcaagaaatagttcactcaagttgagtctcattgaacttgtattccacacattgtgtctcactctgtcactcctacttacccaaaaatcttttcattccaaagctactctccatgactcaagtttagaattcattctttctctcaattcatcaactacaaccatctctgtcatgtattgtctgcataaagcatacactaaggcactagctattcaatgtgcccaataactacatccaataccaaggtaaactgatggaataatggaaattgtaacctattatgcttatatccctattatgttttatcccgcatatggtaatgttccatcccaaaaaagtgattgtttgtttgcaacccggaatgctcaaagcagtgctctgaacttcaacatggtagcaatagaaacaagaacagtagcatgtgctgagacttgagagaataaatactgggttcgtacctaagatatagatcaaatgacagatttaggctctcgatcctttcagggagagaaacatttttcccaccccaaaaaatgctttcttgcttggtagggttcaaacttaatgatagattgaagtaaatgtatcatgatcaaattttaagcaaatttcaatcctaaatagctaaccaatcagatatcaaggaaagtccagtaccacatacaaaactgtattacaatccatttaacattaatatggattcaaagtcaatccttcgctaaagccttccataagacttctagtgccatactggcatatactctatctatctcaatgatgactatgcaaggatctttttgtttccttcagtatagatacatcacatcctgcagtagacataaagctttcatggttgacctccctggcataaacccaatcactctcaaatgcaggtctaatcttaatcaactcactataactctttctcacgttccacagtgtaactcatgaacttgattatctggaatttgcacaattccatgtctctcctatattcttatactaacaggtcaatatatttgaggcttgaatattttaagaagctaaagccacaacaaagattttacattattgcttaggattcataaagaaaaagtactagcagtataaagagaatgtttagtttaaagtagtcagaaaatttcattaccgttagatcaaatttggccattgccagatgattggaagccaccaaccgttttaactttaaactttctgctctctttaaagaacctctcaagagaacaaacaattgttgctgaacagaaagcgaaatacctatacttgtaaaaggtgagtatgacgatcctagtgtcgcagctgtacttgggatgccattttcaaacagcaagtttgaaatagctgctaaagtatatgcaagacaggtatcattactttgctgcacaaatgaaaattgtcagtttttacagcacaacatatggaaatatttgccaacaacatttatgttgccaggtaccccttgtagcatagcatgcacaggcaaacatttgttgtcagcttaggttttgcaaataattggtgaatacatgttcacaattttatttaataaataaagcttatttttatatgattacctgctgagaaacacgaaccgcctccgacaaaacctaaacataacaaaccaatataagtgacaccaaaaaaatgtatagtattatattagcttaatgattagtggagtacaaaataatacaaattatagaagccttgaggattagaaaaggtagaatgctgagcacgtatcaaaatcaaaatgctaaaaaaatttacctctaaagccagctttggatgcccaaagtgaaaatgcatcatccccaaacataataatccaatttcatatcttccaaagccactaccactaactgaaggaatataatcaaatccttcagtccctgcacttttgtccaacaaataacagacaagttcagttgcagaacataatgttctctatcctttttattggctattaagtcactaaacccttaagggtatgggcacaggacaaatataattttgagatctataatcaaagcaaaagacaaaatctatggatgaaggaaaaggtttacaatttatgtagggaaactttaatgaattaatgtcaaattgaagataaagagaataaggttattagaaaaaagtagaatgcaggcaagacaataatggccttcagtagcacgcaaacagactagcaatgtcaacaattttgtgggatgagagtcaattgtggttattgaggtagcaatgaatatcaattgacaatgaactgccacaaatgaatgatgcattatttctgcttgctttatatgtaattagtcatcaaatgaacccaaacattggcaatgccgtcaaagagattgaataaagaaataaccgctcaattacctgtaatcaaaatagcaatgaagattctccaaagcagaaatataatcatcatgagaaagaccattcaagtagctcaaaaagtgaacctggattgaagtgaaagtcaaaatctcggcaaaaatgaaaaaaatctaatatattgaaggaatagtattaaaaaaatctaataaacttacccgatgaagttcaggtgccaacttttgtagttgccgtagaatgatttcaagcccattgaaagatacagcactaccattcctgcaatatatgaataaaactttaaatttaatataattacatgcactgttacagttaatttaaaaaaaaaaaaaaaatcagtgaagttctaagtttacaagttgttacttttcaatggtatcagcttgctcctgcaagtacccttgtacctgccagtttgtccgcagaaataccgcactgctgtgatcaacatctcgcagcatgttacttgaagggtccccataaggactagctactctaactttctcactctgtttggatactgaatcagcaggcacatcaatatctgtgcatgtgagttccaacattatcagggaagttatgtcattgtgtcaaacagtgtttccaagagcaaggcataaacagagaaaacccaaaagagaagtgcaggataaacaagtgtagaaacagaaaacagatttggaaaattggttaaatatcctggtctagatttttcaagtgctttcaaaactacagaaaacactaaaagagcagcccaattaaattagatccttataccatcaactaaactcagaagagtgttgggtgtatgaagatggaatggaacaatttcactagcctcctttcttgcttcaatttcttctgaaaccttttcatagacaaagttctccaggtccatattctcatattctgaatatgtctccagattactactagaatcatctaaaccgtgttcttcataggcaggacaatttgagaattcttctttacaatagatcccgaggtttgtcaagagatgagatacaccctggacacccaaattagaggttatgaggaggataagatttcattttaaagaggaaaagtgaaaattacacatataaactaagcatatgagaaaagagtaagaaaaaaaaattaaccagagactcaaaattgtatattaaactcctaatagcaacatgctcatcatgaaaacaaaggataataggtgctgagccccactccacgaattttagtaatatcaatgtaaactcattcaaaggtatcatttagagtttacttcagacaacaatactttgttcgaagcacctagcaatattatggagcttcaaagaagacaacttcacctccccccattttttttttgacatggataatgatcatataaatattcaaacaatgatcaatttaaaccatcttaagaatgcagaaaacatcatacctcaaacgatagcaagttaaaagcaagaacacaacgccgaagaaatatccccaggttactgttcatgtccaaaataacctggtcatcttccacagcacctgaatcaggacccccaagtattcctgaaccacattttactatcagtaaatatgaaaatttgatctaacgtataagcaataaccaaatgcgctgcaacttgcaagtaaaataaaaaggataaaagacggaatctaatagaagcctggtccagtttctatcagaatcaaacaagacagaacatataaaaaaaaaaggtcaaaggctagcaaatattaaagctgatcaactcacctcgtatatcgctaaaaaaattaaacaaatcatcaggtgatgacagagatgatagtctgctcatcaactgatcaataacccaggaagcctcccagttctggctcatcattctcaattgatggatgagttcatccaattttggctccaagatataatcgcaggactgcattattaacaacattttcaacacaccagtatgaagaaaatgtgtgatcgaacactgaattagtaaaaaatcccaaagaatatgggaatgctaaaaaacgattaaaatagcatgcccattccactggcactacgccctaagataactaagatcctatttgaatagactcttcaataagagaaagtaagaaggtaagatgaattaagcttctcccataagttaagattagcttataagttaaaattattagcttttggactttggagaagctaaatgagagagcttatataacttagccaatgcataataattttaacctttgggaaaagtataattcattctaccttcttaatttcttctgctacaagtatttactgagaacccggtaagagaaaacagacaaggcgagaagctaaggaaaaaaaacgagcactatttagcacaagctgcctgcgatacgactaaaccaaaaattcctccttccagagtgtgataagttcaaattcaaattcaaattcaaaatggtagaattgattgaaatgcaatttcatttgtccagaatgaaagaaaaaaaagtggtgaccttggtgagggctaataagaacaagccaaggcgattgtgctgagcaacggaagcgaaagggaaggggaccgatatctgagcgggtggagcgtagatcttaagaagtatgcagagtgatactttgtgcggtgtgattgcaaacgcgcccggttgcttcaatatcccacccattagttatcgtcgcctgctttctgtttgacaaaatgctgagctgattgtgcaacttgagtacagtgatgttcacttcgattcgatgcctgatcagtgaagtgaaggatgaaggagcaggacttggatcagtattgctgtcaattaatttgagactgtaagtggacgtttgtctagggtttggtttttgcttttacaatgaaaaagcgccaactgaaaaatgatactctgtatttaaattcagaagtacacatgatacacgtacatccactccctgtattatggctcaataaaaaaataaaaaatgaaagactgaataggaaaaagagaaaggtgggaaaaatattgattttcagaaagaaaaaaataatacgttttctgctaaactatatttttactcatttgtcattattttggaagaataatattgacttaaatttgagagataaaagatttttaaaagtaaaggatgaaagcaaattttaataaaaaaataagaaatttaaaatatattttaagttagatttttttatataaaattgatttttttttatatacactaacaatctaataatctaatgagaattgtaaccaaaaaaggttggtgcaatgagtgttataaatattggtccagagtggtcggtcgaataggtcagatcgaaaactagtaacataatcgggtcagtttcgctttaggactggttatgcagttgatctgaattggtccagttaaatccgatcgggttggtcaccagatctcagttgaatcggtccgatccagctagtttaaaaaacaatggattttttttttgaaaaaattggattttttttttaatttgaatttttgaatatggatctttcttactcagaaataatattagttatatacttatatataatagatacatatataattttaaattttaatatatgcccggtcaaaccagagccatggtccaccgattggaccattggtccaccgattggaccattggtccaccgattggaccattggtccactatctcaatcgagtcaatgaccgaaccaggttttacaactatgggtataatggtataagtcatgctacattcacatgacatgagtgggatgatccatttaacggtataatatatgtttgattctcattatgtgtacaatttcttgtttcaacgacaacaattattagtctctttgagggacacccttgatctctgacccaaaaccaaaacaaatctattgtgaattattaacaaaagtaaatcaattatatcgagaataagatctttatatcgttaaaaatcccactcattaagtaagaaaataaaaagcaaaataaaccatttactttgtttttgaagtatcatcctctctcttaaatagtgttaaactattgaaattatacaagtactccctttttttcaaaagcaaacttaagaacttccattgatgatcacctgttgaatacaaaaaggtaattgatctataataaccttggcttaataaaagaaaaaggaagagaaaagtttatattttcagaaaattatgtcgcaaaagtgttagcgacggaattagcgacggattttgcgatggatttagcgacggccagtgagtggcgccgttagtgtggaaactggcgctgttagcgtgggaggtgcgccagagtggcgcgattagcgccagatatggcgcggttagcgccagaatgctccagaaagccatttctttcgaattggtggcgcgattagcgtggggtgtggcgctattagcgcgggaacgcgtacagaggccctataaaaggctattttcgcgttttgggagagaaaaactgtttctcttcctcttcctttgccatttctgccatggatgaggctccaagcttcatttcttcatcttagttcaccaaaactcagccctttaacttctaatattgtgggaaacacgttgtgagctataatccttcctctttttccttaaaacccctcaatcagagaaatccctttctcaagggaaatctgtagaactcgagtttggctaggaacggcggcgattcacggacacccagactaggagaggtggtccaaaggccttccttgtcatctttgaggtaagaaactcgagtttcaccgtttaatttgtgaattggggattctgatgaatagtgacccacttttggtagagctagaattagctctgggtccagttgagagatgtgtttagaatgatgagaggaggaagaattagcttttagtttgtgatttggtgaactttggttttggctctaggttgtgcatgtgtgacttagactgagtcacttgaattgagacatgcaagagccatgttgttgggcttgaggtgcctgtgaggccttgggaacggtgtcttgtgattagaccgttcaagccctatggaatttctgtgttattgggtagtgtgggctgtgatgcccgttgtagatggctattggtgagtctggaatgactctgcagccatggtggatctgtgatagaccactgaggatctatggacaggattttgatggatgagcctgagaaccttaggttagataacctgggttgttggaaaggactgaggttcctttctcagaggcagttggtgactgcttaatgagcttatgcatgcttatatgcttggatggtctgtgatatgtgtgtttgcatgccttgatagggcttgacacggtgggtgtcagagaagcagaccatcatctgaggttgaagctgcaggcacagcttaacaggtaagctcatcgttctgggaattagcccttatgcttgtttgccacccaagtgggtgatgattatactccatgtaattgatatgtatatgtatagattgctgtgtaaggccattgtggcctaattctgatgtaagatggactggacaccgggatggtgtcattatatgaatgtatgatagcctagtgtgtgctgggctgaattgatgaaccctaggatagacactgagaaagtgtgagggtatttgacacctgtggcttcaggtgtggccttgggcctgagatgtaggaacactgtgaggtgttccatgactttgatgagatacagatcagaaaatgatctgtgatggaatctataagatactgagatggtatcgggctagttgaggttccctagccagaggaagagttgaggactccctggaatagctgagattccatgggaggtgccactgctctccgtctaaagacctaagggtggattgccctgtatggatgttcctccttaggcagagatgatgaaagtcctgcgtgagtatcctcaggtgattatgcagagattgataaagaccatggtggtggtctgtgttgaggataaatagacactgtgatagtgtctgagttctgagattctctggccagtagaatagagtcctatggtggtaggacagatggtatgtgattgaaagtcctaagagattgagtgcctcctgtgtgagatgatctctcttaggcatgtggttgatgaccctgagggatagagtgcctccgttgtgagatgatctctctcaggtgagagattgatagtctgagggatggagtgcctcctgtgtgagatgatctctctcagaccgtgattagaagtcctgagggatgagtgcctccgttgtgagatgatctctctcaggcagtggatctagaagtcctgaaagatgagtgcctccgatgtgagatgatctctttcaggcatatgttgtgtgaagtcctgagttgagagattcctcaggcagtatatgtgaagtcctgagttgagagattcctcaggcagtgtatgtgaagtcctgagtgaagagattcctcaggcaatgtgtatgaagtcctgagtggtggactcaggccatgcttgatatatatatatagcattggaggcggtgcctctctggtatatacagtgtctagtgattgacactgatgattaggtacctctgtgagatctctgtcagacgattataagagccgatatgagatattgaagccatgattctggcttggctctgttagatggttttgagatggctgtgagagccaggatgaggtgtgatacctatgatactgagagtatctggttatgttgcctgtaatgggttatgaaagctaggataatttcctaagctcgtttctgctttggttttatgtgtatgctttgaggtgaaccagggtaagggaagatctcccagaaccctgagtttactgagacgtttgtctcacccctgttgtgggttgtggttttcaggtgtttccagaggagagaagatacctcagggcagaaggccctagctgagagtactggagctggtcatgggctgcagatgaagactagaagagtctttagtttgatctctgtcatgtactctgtatagagatagggtgtaagtgtacacccattgtattgtacatatatgatgtatgacctaatatggtcttgttttgagtgtatatgtacagtttatgttgttgtataagagtacgtttcctcctgagtctctatatttagatgtgtgtatctgcctgtgtttgtttatttctgttcatctggatcaacaggggcttgttttctatgatgctttgtgttgagttttatattccatgcataatgaaatcaagaggatcgattctatcgcttccgcaccgcgtttatgtaacgctgatagcgcgcttatgatattattaatgataacacgtccggggtgttacatgatctatactttcaaaacttgtgagactagcataatcggttgccacccttgcaatggaatgagtgacaaagtctgtttgcctcttgataaactagatcaaatagtttggattgagggagagtatgtatgcgcactcttgaataatgacacaggtcaaaaaaatcttgggtcatactatagatcttatctacaactagcttactatccatttcaaaaatcactctacaaaagtgattctccaataatcatttgagggctttcaatgaccccaaggcctccctttcagcaataggaaagaactgaccttcactgtcaaaaatcgcaactttgaaattgccttggttgcctctacaacaaatgccccaactagtgctattaatatctacatggaaggcgacattaatgttgttgcatttgacgaatcagacaaatattgtttagcattaaaaaatagtcttttaattagtattagcatatataattattgaaaccttttgtttgagtccaatcacacaaatattgtttagcattaaaaaataatctgaaaagctgttggacgcttgttttcccaagtgagcttgttcctaccgtgtcatatagatcagataagagtagcattgaaaatcatgctatatagttcctttagtattgaacatttcttcaaattagtttccttaatgttagtaatattttttataactaaattgattgtttattcattaaaaggtgtatgaccttttttttccccttctctctttctctatttttgcacaaaactttttgtgtcttgtaccaaaacatcattttccttctcctaaaatttaattttaccaaaacaaaaatacactttgtttggttggtggaaagtgaaggggatgggtggaagatctattcttcaaatttttcgaaagtgtttctgggagtttttcttcaataaaaatgtttttaagaattatttttaacatcttatttgtttcaaaatattattgttgtttttatttttaaattaaatttcaattttttataaaaatgatcaataattcaaaatatttctatatcacagtataaattatttattacaaatttaaaatatactttatatgtttaaaactattcattaattatgaattttatttataacatataatataacataatttatacatttaaaagttattatttattataaactagttatatgaaataatatttttcccacccatgttaaaatactagtttattgatgatataaaaatctttatatttttttataagccaagtgatgtattattaatagaaagccaaactgagaacaagaagtgtcaagtgatgtaaaattattgatattatcaatgcaaactcttactttaattaatagtgtaaaaatatatacattgaaaatgtttaaaaaacttaaaatcatgtttttttaatataaaattagtgtttaattttgatacactcttagttaaaggctttttacaatataaactttttttattaatttttttagtttttaaattataaactgattataaatcattttaagtaaaatttcaaaataattattataaaaatcaacaattttaattatatacaacagacgatgataagcataataaatatttacactgtggtatcattctaattaaattcacaaaataaatttaaatatgcattcttaattgtatttcattattcaaaattaattttattaaaattattaatcctgaccaacacagaaaaaagtgaagctaactgcacaactgcaagtcagtatgccaaataataacctaccggtctttcccattaaataatttagtttcctaaacttttttttttcttctttcaatattttcttctaaaaagtaaaaaacaaacactcgaaaacgcaaatctgggggaatatcacccaaaaccctttgtgtttgagcttccgacaaagtcttgatctacgctcatggcttctccggtaactcatcaatcgccaccttctctttctcactctcgttgcgtgttgtgtattttgaatcgttgttaataacactgagctgaatttgcaatgacacagcgagctgcagaaaacaccgagaatagcttggagaagatcaagcgccagctcgcttccgcttccggtagaaacctgttgcaaggaccacttctcaagagatctgaaaccgtaattcattcactccctttatctcaatacctatttcctatttctcacttcaatttcactttattttcgcctttactctttttcttctcccaattccaatttttaatttcttattcgatgttctgttataattccaatgcgttctgttttgttacgtgttttataatcgtttgaatagccaaatgttattgattgatgcttttagaaagaaaaagaaaaaaagctagttcatgtaagaatcgcttttgtgttcacagctgagaaaatggaacgagcgttgggtcatcttggacccgacaacggggagaatggaatacaagtatgtgtttgcatattggtttctgtttgtgtggggaaacggaaaatcactttgattactgatcttctgtattgttttgaatgttttccttaccttaggataagacgaaatgaaccttctgttaaaggaacgattatatttgatgccaatagcaccatcaccatatctcctgtgaatttccagtaagattggtgtttttaacataagcttattttgcctagtttccagatgtttttatgaagttttgttgcatgaattttcttatattgacatggttgtttatttacttctgtgtattacagcggacttccaaagtacgatgggtgctgcttttgtatcctttttatcgcatttactacttatgaatcatcattttgcagcaaattgatggaagtcactctgcttgttaccttaattggcttctttagatattgggacaccacagaaaaaggattacttcctctgtgcggagactcctggtgtagctagagcatgggtgtcaactttacagtaagttttataatcttagaatgtaggtttgaacctaattcaacccaaaaagttagctcatggtgtgaggattgcccctcacttatatgttatattttgacattatctttgaccaatgtgagacttgggtttttccctacaccccctcacgcttagcacttttgaacttggtgtgtgggtaacatggtggataaaccttttaatggatctaggacatcttagaatgtgagtttggacttaactcaaccccaaaagttagatcatgggatgagggttggccctcacttatatattatattttgacactatctgaccgatatgagacttgggtttttcccaatataatcccacacttttatctcccatttccctctgggccaagttccaaggaatataatcttatcctttttattttattttatgttgtcgaatgtatgagtatgaatgttataatccctttgtatttcaaaagtgtataaagaggtgtagcttacaaatgaaatactgcatgcttgaacctaaatgtactaatgcatttgttttgagttttatcatttattttctattatcttacaaaactttgtttactttgtcatgtttcaaattattgaggattcataagtcataactgcagtccttcacaattttctaactcttttgaacagtgtgtttttatattcatttgaataggcatttgcttggaaagggagacctgcagaatactaatgtcatgtcataattcagcctttatatttatgttacttttgttattatttactataattatttgtctgatgttcttgctttccgctacagtgaatcaatttgaatgattgctggatcatttctatttcagatttcctgtctaatagctgtaattattttgatgtctgatttattttatcatctgacattagtgcaactcagttggttctaaaagcgcataaagaagctgtgaattccttaagtgggaatgggtctacaaaattaggaactgttgcaacagttgttgctgcatccaattcgacagccttggaatgttcaaaagaaatcgaagcagcaatgcagatttctttgcgaaatgctctgggaatgatgaatcataggactactgatggtcctatggatgatttaacaatcatgaaggtacaatctagttctggtttattctgtctttcttgtgctcaaatgtatagttcagcatttgtgatggtgcagcagagaactgcagagttatagctactatttttttttgggtagccttttatatacaaggactgatttggaaatcttttctttttgtgcaaggactagattaaacatgtgtgtcatgtacagtgataaaaagtttaattaaactttttataataagctaaaactctgaggaattttttttaagtactattcttagaaggtaaagtgtgttttttttttttttttgtcaaagcttaaccaaatgcacccttaactagatagttactagctataacattttaatttttttttttttttaatgaattttgattgtgtgatgctttgaactaattgtcgtactttgtatataatgcattcaataatggttgtggcaagatacacaatatggttgaaattgaattatgataaggcttctttgtacgccattgtcatgtattaaacaaagaaatttgtctttccttgtcatggtgttgtttgaaaatgcatgaattactcctttgcttttggggttaggggaggactacccttttcatcactgtttacttggctaactaacgtttgcagacttttgatttatgttcacttgcttagaaaaagaaatgaaagcaaaaaaaaggaagaaagtatattggggaatatcactttttcctcttgtagtatctattaaagggggagggggcgtagtggccaagattttgaagaggaaatgaggatggtggatataaatagagaatggatttgttttttaatgtttttatgtgggtatttattgtcttcttgggccttttggttctgaagatgctactccactctacaggaaacacttagagtgaaggaaaacacatatctgtattgcggaatcggcaagtgtaccgatcgttccaagtaataaagtaaataagtagagtatcgtctccacgaggattgaggcacgaattttattgtaattactatctttaaattggaaggaataaaatttaattgatttatgatttgtattatgttttgaagaatttaaatgacaaaagtaaattgcaattgaaataaaagatagagttgattatgtttttatgatttatgggaaagaattgtagtcagagcacttaaccttattatccctacttcctttacttggattaattactaaattaattattctaaatgtttagacaatgtatctttccattaatctagtaagccctaatcccttagtgactttaaccctttaattcatttaaaatcctaattccttagtaatttctcataaattaagcattaagaaatacattaataattctgcaatcatacatcctatccctaggtaatgtacgattgttactttactcttgtcagtcattaaagccccaatattcctattgtaaaccctaatcctcagaactttattagaatgatcagccctaataaagatataatttatgaaaacagagtaaaatgaaacaaattagcataaataataatagaaatcaatccaattacagaggagttctcattaggttttggccctaactataaagagagaggaatcagctagacatagttatgtctgactctatacaatggagtgagaagaataagcaagattagaaaagaagagtatgcaaacccttcaatcttggatctttcttgaatcttctttctttcttcttgatcttggtgatgcctctttttccttcttttctttttcttttttgaacgtcccttccctttccattatgttcctatttatacttaaactataaaagccctaatagccttcagtttaatgttatctttaagctaatttgaaattcccgtgtcgctggcgcgactggcgcaagatctggtgcaactggcgtcagcttccagtaggtctggcgcgatcagcgcggttggcgcgagacttcagaaatccttagctctttattttgcttcttttcttccttttcttggctcctaacatcaaaattgcataaaatcagtgataaacacaataatgatgaactttgtacttattctagtatttatttgatattttatgcttagtttcttaatgaatttaccctaaaaactacatatgctaacagcatatcactactccacaatacaggaaacacttagagtgaaggatgaggagctacagaatttgtctcgagaccttcgagcacgcgattcaactataaaagatatagcagataaactctctgagactgctgaagctgctgaggctgcagcatctgctgcttatactatggatgagcatcggagaattgcttgtgcagaaattgagcgtttgaataaagattctgagaagcagcaagagctgtttacacagaaggtatgccattgtgctggttcatttgaaaatattttttggctgatggaaattcaagtgattctcgttaaactgctttcgacaattgacccttagctattactatgtatgggtattacttgcaatgaaattgtcttgaatgttcatcttgtcttaaattgttttttttttgtagctgaaagagtctgaagaaaagattgtgggcttaagcaaagaaagagagcaattaatcaggcagagagatgctgctattcaggaagcaaatatgtggcgttctgaacttgcaaaagctagagagcatgatgttatcttagaagcagctgtagtaagagcagaagaaaaggttagggttgcagaagcaaatgctgaaactaggataagggaggctgttcagagagaatccacagcgttaaaagagaaggaagagcttcttgcatatgtgaatgtactaaaagcccaacttcaaaggtctaatgccttattttcttttgcccttgctttttgttttgttaaattagatttgttggctacttctgttttcccacataaacataaagatggaaatagtatatatcaatacctattgaaacagggaaatggaaggagacttttgatggtttattttcctttttatttcattgagtttgaatatgtatatcagtatgaaatgtggagcatcataaaaccaaagttgacagcagatatttttctttacaacaggcaacacattgatacaactcaagtttttgagaagacagagtcatgctcagatacaaagcatgttgaccccacggaagagaatgtggataaagcatgcctgagtgtttctagagccatccccgtccctgcagagaatgtagtccacatggcaacagatcaggtgaacattcaaccagttggggataatgaatggagtgatattcaggctacagaggcgaggatagctgatgtaagggaagtagctcctgaaactgatggaagcagcttggatattcctgtggttagccagccaggaaccaatcaccaccatgaacaaggagctaactctttccatcaaccctgatatgttattcacaagtatacaacatagagcaaatttcaactttaggcaatgtaattataccattttgttggatgagcgtgtaaaccatattgttttcattttatcattgcctaatcaagctgtgttatgacctgccctgaaaagtgaataccttttttctgatgtaaatataatgtaatacaacacgagctgtccggtaaaccatctgtgatatgtaacatttaatcaacgaataaaaccctttttttatccacaatgaattgaggaccttcaacaattaaacaactgagctttttcgagtcccatgggatggagtatcataaatattgaagaattgactagtaaaaagcccacaaatgttttacgaataacttgatgtagtactttattgcgtgactttctttagaatcattgcaacctgacactccctcttttcacctcctcctcaagttagagtggtgcttcatacaccattactcatttcttctacaccattaatttacagtgcatttcccattctgcccttagctttttaaaataaaaaaacctctccatttcccttctctcactcactgttcactgctccccttttgtctccctcacttcatccggcatccattgcgaagcagcttcgtttgtcatttcggtgaggctttggtggtggcattgggtgggagcatgctctgcggttggtgacgagggcgttgaggtaagtttcgcgttccctcactggttttttcttggtctgttacgtcaatgggagccttggcctgatacggattcagtaatccatacactccatatggattgaccaatccgtataggttttacggattaggtaatccgtgattctcatatggattgaccaatccgtatggggtgtacgaattacctgatccgtaaacctcatatggattggtcaatccatatgaagtgtatggattaccgaatccgtaaacctcatatggattggtcaatccatatggagtgtatggattaccgaatccataaacctcatatggattggtcaatccatatgagatgtaattttttaaaaatggttttgtattagtgtgtatcccaaagcacaaagcccaatttctaaaatgatattagtgtgtatgagtgcgttgagatcccacactaactagacgcatcacaatatagtccttataagacttggagaatgcttacgtaagaagccagttttgtagggtagattaggttataagcccaaattctaagacatactatatcctaaccccctgtcacttttgatgttataaatgtatgagtatttccactttttggtcccaattattcttccacttcaaatataaatccaaatggaagcaagtaatgtcaaatagtgcatacatttattgagataggttaattttcttataatttgcattgtgttagatgcttattaggctgtaaataggaatttagcttaaacgtttgagaagcttttattattttataattatgaatttgttattgaaacaatatctaatgtttgatttagaggaacaatttaggtttaccaaggcaagcttttattattttataattgtgtatttcttattgaaagagtatctaacatgtaaacaaatgttgtacagcttatggctaagactagaggaatgcgtcaggctcttggacgagatgttgaccgagcaagtggtagaaatgtcggaggtaacaaagataaagccactgagatgcgtaggccgataacattgtatatacgcgggacacacggccaagagatgcacagcgaaggcgacatggatgacaataatgccatgtttttgtttaaatagtttggacattattttttgactttttcatgttggacaattgtgaaaatcatttaagtcaacatgtttagtgcagaatttcattgatttagtatacatttgcattcgactcatgtaatgattggaccactattgagcttcatttaaacagtgagtagcccacaagcacgccgtagatggcaacaggcacttgtttcttaaaaaaacctattacaaatacaattaacttcaatcaagtgttaaataaataataataatattttaacatattatgaaagtctcaagaacaccatgttaaaaaaaaaagaatcgaaaaattaacttattgtattgtattttctcaacgaaattatttgtcaacttcaaatcaatctcatttaaatatatattttttgattttttttataaaaaagtaatggtataagacatatggattacctaatccatgtgacttatacggattgaccaatccatataagtcatacggattggccaatccatataattcatatggattaagtaatccatatgagtcatatggattggtcaatccgtatgagttatatggattgaccaatccgtatgagtcatatggattacctaatccatatgaatcatacggattagtcaatccttaagagtcatacggattacctaatccgtgaattccatacggattaccgaatccgtacgctaccatcaaacaacagagacccacctctgcaacccgacaccgcttcacgaccttcgacggccaccaccacgacacaactccgacgaaatcaacacaatgtcaccaaaaaccaccaatgcagagcgtctctagcaaccggtggcacaaaaacgaaatgaacacagcgaacgaaagtgggaacagtaaacaaaagtgaaaagctttgccaaatattacaggaaagctgccaggggtatatttggaattttttaaaaaataatggtgtagaagaaatgagtaatggtgtatgaagcaccactcctcaagttatgccctttactgggataactattgtattaacagctattttgtttccaccaaaaaaaaaaaaaaaaaacagacagcattgatgggattgctaagtgtttcacatcacttcccatttccaacccgaatttatcggagcgttgttataagtgttgacgtcgaagttatgtatgcgtctagatgaaaatgaaatataaggatatcgtttgaattggtaaaatgtggaagaaatattatgaaagtgagtgaattttattacatttttatatcattatttatttatttatttaattaatttgagtgaaatgaaatataatgaagattttgttttgttctatcataacgtatccaaaaaagttaaattagacccaatgaattttgaggacaagtttgtgttatcttgtgttatttcaacccaattttatgtcgtatattcaacccaggaagggcagctgatggtgtggtttttaggaactcccttggtatgttcattggtgcttttgttgagttctatggggtgtcctcctcccatcattctgagttgctggcagccatgagagccattgagcttgcgcatgataaagggtggcatttcctttggttagaatgtgattcgactttggaaactcttgctttcaagtatcttaacttggtcctttggaacctccgtaatagatggagaaactgcatgcatatataattatatgcgacttctaagatgaattttcgcatctcccatatttttagagaatacaacacttatgcaggtaagttaacggccttcgaagtgtatagttctaatttttgttggtgggacttttccccttcttttattttagatgatctctatagaaacaactcttgtaaaacttcctataggtttcatcgaggaatttaatttttggtaatctctgtcatgggttggtttggtccctcatgttttttggtataaactgtttagttttaattctatgatctctggtttgtgggtgttgggttgcgggtttggttccttcttttggagtcttcgcctctcttagtcccccagtctctcatcgttatttttgaaaaaatatgtcgtatattatcttaaaaaatataagtcttttgaaatcttttgatttaatagataatattttatataatgtaatattatatttataaggattttatttgttttaatatatatatatatatatgtattattttaagctttttttacttcttttattcaatcatttaactatacataatgttaagattaataatttaatcatttttttattttgtatatgtctagtaatattgctgcttgtgaattaaaagatttaaataaataatccggttataaaataatgtctaagtttccttgattgaagttttttttttctcgatagaaaacaaaaacaggtataaaaaatttataataattcaaatcaaataattatgctaaactcctatgtcttgattgaaatatttaaaacatcactttattgatgtccactgtcacctgttattatacacgacgggtaaagttaattaaatcaaataatcaatgctttattaattatatttagacacacaaataaaaaggaacaagaattgtcccctaatgagattgataaaaaagaatagagggtaccatatatatgacaaataatatcaaaactataacccgttcatacaataatatattttgtcaaatgggccaaagaaaaaataacaaaatactcctatttggtcaaactgagagatattaaaactgttactgttattagtagtttaagcatccaaatgctcttaaaatctattgaattctttacaatgatcagaaaccctggatggatcaatagcaaactgaaccacagatgtgagatcatcccaattctcattagcaaattccacattattattctgacgatgattccaaaaacttgagtaagccaaggatgttggagcctgagctacattgcctaattgacctagaaataagtggttacgttcaacgtcaacatgtccattaataactggcttcttttcattttgttgaatgagttgtggggatgatgagtttctgaaagtcaagtatggcttgcagttgtcagattctaagctgcatgttttggaacttgaagaatttgtggggtgatttggctcagtgattggtgctgccaagtctttcaaatttggtgtgtacttcttgtaagttgggactcgtttgaatattcggcatagcgtccacacttcctgcgaaccccataaataaaaagacataaaaaaattaagacacttaaaaacttgcaaattaaacaaaagagacagaatgctagagttgacatggttgatcgcattaagtgatgccacaaaatgaaataaatgcaatttatgtaacgctgagatgagaaccacacaaaattgtcgaagtgtatacaatatttaattagttgcgagatttcttgttacgtaaaccatcgtttagtatattaatatagcacaatgttaggtactactactttttattttttcgttttgtccatcaatgctttggtataattgaacgggaaaccaacaatggaaattactaatttgatatgtagtacttctaaaaataactaatttgatatgtagttcactagttcataataaaggtttttaccctgtcaaaaaataaataaaggtttttacacgatcattaatttttctacaattttttttttgataattacatttttttactaatttaagttatatggttaaatgatagtgtactattaatttgattgttttctcctttctttaattactattaaatcccattcggtcaattcaaaagagcttgacgagccaatgacctaagaaacgtgtcatcagaacacaaattagactagactgaacatatataggaaccaacatatatgttatgaattttaatatgttaattgtatttatttaattctataaatgaaagtttagggattttagcttaactaaaacttcattataatatattaattataaaacaagatattccaagcatacataacatatattttaatttttttagctaataggcaaatagtataaacttaatttgctgtacaagaaagtgcaacacccgtatcctgacatataggcagtggagccaaaatttctgggtatttcatgcattgtacatgccatgtgtgctagaagtttgagacccaagattatttataaatattttttagtaacaaaatattaggtgaagtaactaccttaattttaagtttaggtctaaaatcataaggaaggctaattaactactaggaagtatagatacaattcgggatatatatgcataaaatacataacataaaaaaatttgaaaattacagaaaacgttgcagctataatatagtatgtaaattaatataaagttaatataaagtaatgatttaaatcacgagaaaaaaaatccatgttttaaaaatgaatacaaatcattatgaacataataaaatataatacaaaaaatcatctaattgttgtgataagtacacaagtttgaaaaaattttaaaaaatacaatattacaattaaaaatattaataaatattcgacatggttacgtatacagctacggtacaacacaattattatttgaaagtgtctgtccttctttgctaaattatttcagcctagaagagttgatgtgattatttaataaataaattggttcatgtgtctttatctatatgcatttctcccttttggggtctaataaacgtgcttatgactttagaatataatttataagtacaattgtttgttagtggtcttcttgagtatgaacaagattctaaccccgaatctcagaaactgttgtggtcgtttgactatgttatctcagatttttctttacatgctgttctagatggtttatttcctattacaaattaatattttatacttcttttaaatacatgcaacataaaaaagaaatttcaaacgtactgtcttattagattataaaaaatagtgtatgcacttatgtaaagattttttatactgtatcattcaattataaattattattattatatatggtaaattattgatttttataaagtattgtaaaagtcatttattagttatgatcagattggttaattatatatgtaaaattttgtaggctaacgatgcatagatattaacgaaacaaagatcgagtaacatatataataattgacttacagcttcttgaacatcattggcatcattagcttgtggattattgctagtttttccattgggtgggaggcgaaactcgtgcatcatccaatcagttttggtgcctttaccagcacttccacgatagtagaccaatgatttctttagaccaatgcattcatggggttctttaacacagtatataggcttgtcaattcctgtggctttccaaaatccagaacctgtcactctattaggccttatgctgttcctgtattttctccctcttatgcaaaagaagtaccattccttttcccccactgcactcacttcttcatacattaattagttatcagcatacataaaattacttgagattagaaatcatgaaataatccataccataaatgtataaaatcaaaatggggtggctagctagttgcatacctaactagctagcctagaattgaaaaccagctaaatgtatatatatcatgcgtgtatacaccaactctgtcttcattttcaatttatattttatccaataacatattattgaagcccgagtttctacatcttcacatgaaaacttcccaaaatgttaagtatcaattgagccatttaattagtcttttgttatccatataattaataattaagatgtgctagttaagtttatctatacatacacttctccaacacaatatatatatatatatatatatatagctttctttagttaagcttaattaattatcctagcttgtttcattcaatttatatatatatatatatatatatatatatatatatcaaacactctagtccttaattattgaattatatatatcaagaatcataaccaaactcatgaaatttatctactgcagcagaaacaaaaaataggtttcactttcagtgactgataccatatattaaagaggaagctaatcttacttggaagatcccatggatcatatttgtagatgtcaatctgtttgatgagttcaattctcagaggcttcttctccacctttcgtctcagataaaaccccacaagctcttcatctgttggatggaatctaaacccaggaagcacaacttcttttttcttgtcatcatcatcatcagagttatgtaacttggacacatccattattagtctgtgtgcaacacttgaaaacttgggaaccttcttataacgtgtaaattattattttcctcctttccatgtatttatattaatttttgtgacctcattgtgtaaattgaactttggctgctggagtcaagtcaaatatttccattatgaagtgcatatatatatatatatatgtgtgtgtgtgtgtgtgtgtgtgtgtgtggtgtgtgtcttaaaaataaaattaaagcttacaagtttttgaccagatgatacatatcaatttatttaggggcctccaaaggacaaatgttaattaatcgaggaaggtgaaatgccaatgacaagaattttgaatcgatgttagctttgagggcaacaacggagtaaagtctacaagagtgggcacaactttgactattacatacatatatggattggaatggaacagatatttgcaattaagaagggaaaaagtcaaaagagatttcaaagacataatttttttagagaattttcgaaagctaactttaacaaaaaagattaagatccaccaaaatcactatctagttctaaatattttcaaaggtaataacccttttcaaacagagttaaatatactttttgttatcataatttaacatttttttttatttttataacttttttttctttttagtccttgtaaaatgtgtttattttgtttttcatctttaaaaatattttagatagtgttaagaacaatgaaaaaaatattatctaaaatgctttaagtacaaaaataaatattttgcaaagattaaaataaataaaaattgtggggaagaaaatgaaaaaaaaaaatgcaaatgtatttaaaccttccaaatattgatttctacctttctaaaagacattttgtcataaaattaaatctacagcccaacaatttgcaaatgatgatggtattgtttgcatatttttcctgaaccaattaattctaatttgaagtattcttctttttatacatacgataacaagaaattagaaatacaagcatgaattttcttttacgttccttctcattttatatgtttgctttgatcctcaataattcatacgtgacaatatgaggtcactcaaaacttttatccggagtgactcctgggtgatgtcacttttaagtttaggtctttatacatatgtagttgatctaaagaaccgaagacagttgtttccgaaaagtaaaaaacttacaatatatatatatatatatatatatatatatatatatatatatatccatctttctaattcagtgtagaagactggtaatgaagaaaaaaattattttccagataaatacaaacgattgttcaagttctggaataaattaattaagcacaagaatagtaaatataattataatcgaaaactactaagtaacccgtgcatttgcgtgcattgctgttggttcgtacattttttatttattttatattctctgctagctattcccctagaaggaattttggaattttggcttaactctaactcatgactttatcataaagcaaacaggttttgtctatttttagattctcataaatgataaggactagtgacaacaataagaagcaaaaacccaaatcacgagccttctgattaacaatctatcttcaagtttctgcaattcattgagacgagacttaagaaccactcttatctaattcttcaacatttgaattaattaactgagaattcagtacacatattagatctgtttgttctcctttttatcttcttcggtacaatacaatctaaaagtttttaacctatttgctaaactcctttgtcttgaaaattctttggcccaggatgaagtgaaaaaaatggacccctaacacacaaattttttgaatacaaataatattaaaattaagggatgaaaaaaatgggcccctaacacacaaattttttgaaatacaaataatattaaaactaaaggatgaaaaaattggcctctaacacacaaaatggacctctaatgtaagttttgtttttatttttttaattttttttacttaagttatcagtgtaaaaaattttggaccctgggcgggcgccctgctcgtcctgccccagggccaggcctgtttaccactagggttcaagttagtggcttatgctcttactttttatgttatgcatgttaggaaggaaattgtggtgttacatagtaatcaagaaatttatacggcaagaattgttgtctattttatgtaataatgtatcatataatacgcaggcaaatatctttgtgctacttgaagcagagtttaagtcattagtacaaatcaaagtcgtgatgctttctttgatataaactcatcagattgagtgttgaatttctcaatcaattccaccacattgatttttccaagagctggttgtgtcactatttttaccggagaaacattttcattttcaagtagtgcaaatttgttgcccatagctttgtgttccttcttgaacttccaaaagagtttactcctggctttggattccagtctttcttggttcatcatcatgaatgaatgctagaagagcagaaagcgtgcttaatctgagaacaaagaaataaatgttacactaacatcacttaagtttttagtgttgtacttataaatagagccaaagtgtactagaataatgattgcatcctaatatttaaaacaaattgataacattcttaattggtccaactgccgaaagtttggtcctcctggtccttactttccaactataggataaattggtctggtttgaacaggaataaaggattgtctaagtctggaggatgacctctctctgtggtcgaatccgatctctctgctaagctttatcacttttaaatctgctaaactatattatatcaacgatcttaatttagttagtaatcaacactatataagctattttctgttgtcttgtttttcataattagacaatgacttgacatcataaataaagaaagaaaaactagagccaagatttgtaagaatggtagaactgatctttgacattttgtgatgcagatcaaatcataagcaaggggcacatgacatcaattaaaaaaattcttacacccattaatttaagcagcgaggaaacaagctcataccaactttcatgataaagctacaattttcaaaagctttttatcataatagagacagagagtttcaagtaatgtaacagacttataatctataaggtgtaacttgaatcttgattattaaagttgtgattaaattcagctgtgaaacacagagctacatattcccataccgttgaaacttctgcttcttatctgatagaattgcatgtacaatcatactcaaagaatgggaaccgcactgcaactaacaaaataaaatatttcatcacttactctttctgttcaactagacaagtccaaagcaggtataaaagtcaaaataaaccaagttttcatttttttgctaagcaaataaatcaagttttcctaccattttattagactcaatgtcagattaagagcagtggggcatttatcattgttcgatgaattccataataaggaattagtaaatggctgagtttttcctcattgcagagacaatggatttgagatttctgccaaatttctacacaccatttgccccggtcatttttcattcactatattgtttcaatgccaggatgcaattgacaatcctagatgattttcctccctaaaatatgaccaataactcagtagaaaccaaaacaacaacacattattaaactatcaagagtctgcaattaagtgctgactatctggtgttattaacaattgaattcaccatgatatgaattggttacttaaatgaaaacagttaacaagtatctaatgctttacttataatatttactttcaaaatactgatatgcctttaatggtgccgcatcagggatcaatgcggaatcaacaggactctccgcaaccttaaaagaatacattgtaacatacaatgacggaataaccaaaacctgagccagtaaaattgcaaattaaactaaattatgatctaactcaccttggatacagttcccgattgaacttaattaataacaatacagagaataatcccacttctcaaacgaagcctaaactcttcctctgagccctgagggctctgctggcaaatctttagctgcaacaactccaaccatttttctcaaccaccccgctgcttcatatcctgctgcatggtaaagatttttctatttcaggattaaaaaaaaactaaaaaaactacgtaccccattgtccggaggcttcacgctatgcgtaggtaaggggagggatattgtaagcagccttatccttgcatatgcaaataggttatttccggattcaaactcatgatcaataagtcaccaataggctatttcaggataacggataaaaatccagataccttttctttgagaacaaattgaaactaatcaaatttcagtcaaagcaaccaccatagacacacgaaaaaaatgataaacaaacacttcacgttaaaagatgaatttttacacattattattatctacaattccaaaactgaattttgatggaatcccagaaaaataatgggaaagtaccaactttttctgctttcctagattccaaatcaagatctttgaggcgaggactgtgtcactgtgctgtcgaaacacatcctccaccaaatttgttcaaagtgctaaaggtgaaagaaagatatatttttaaaatagaaaaccaagagagcaaaatttgtaataccaattagatcactcctattatttgctccaagtttaacaaacaccataattttctgaatgccacgaatgttaagatattatatttctgtgatggtcgtccgtacaaaatattagaatgttcaattatttctgaatacactatccaagcaaagtattttaggctgatttttaaaaataatacaaattaattatttaattaggaaaaggggataatttttccaataattagcaaaatggtgcagccaaacacgcccatttggggcgtgtttgccctggtggcgccacgtggtagggaaaaatgggggtgcagggttttcgcggtgttttcgtaaaattacggaaggcgataacttttgactgggacgtccgattgacgcgaaaccggtggccacacgctcgaaattgagaggagaagccgctagcccaaaattttttcccaaacgaggcctctaagtgcctcaaaaatgcgatttaagcttcggagccccaaaattttttttgttttctgatattttatctactcaattagtgaattgcaagctattctttatttatctatatattaaaaatattaatcctaaaatctaaattaatttttttttgacagcaaaaaatcattaaattaaaatacagtatattcaaaaaattaataaaaataagaaatcgttttacaaccaaggaaatgttttaaaaagtccacagccaaagggcaaaagaaaaagtaaaagtaaaaatatgaaaggaattgttgttacataccctgtggtggcactcatatgctctcccggcaagttacataattcagtcaaagctgacctctaatctaagcctgcaacctttcttcatgttgaagcatgtgtttccagtaactatttctatgagggttctaaatgctcaaatattctttcattcttcaatggcattggatagagcaggtggaaaatgtttcatctatgatgttttcctcagttttagacacgatttttgaaattttgaatgaagaaattaaggttactaatttgaaaattcttaaatgagaaaaaataaggaagaccaaataaaattcttttatgacaaatggattggtttatttaaattattattatttaacaaaactctaatgatatttttttcttaaattgtttcttatatgattttgttaacactataggaaaataataaaaattatgtacttatatatcaatggtaaacaaatattaccaattcaatatgtcaatgatagaataaaaatactaatttaatattcgtaaaatttagttttcaaaagttctaagttactcccttattagtcctaaattactaacttttttgtcatttcattaaatttaggattaaattaacacaaaaaatacatttagaaattaaaaagggagtgactttaaactttcgtggactaaattgtagaaagacatatatctagtaacaagttaaaccagaatacttgaactacaacaaattaattaatgagcatggaattgaaggaggatattttttactgtaatcttcttatggatcagggaatagtggtcaaagttgtttttttataatttaatgcataaaatatttaaataggtctttgtcatttaatgttatgtgaaaccttatttttattgggtgtcataacttatggtaactttcacgattttaataaatattttgttatttaaaaaaagataaataatttctcacttttataagtgaaattatgagtttgtgtaatcacatcataaatatttttttcatataacaaatttataataaataatttttcctaaaaattagagatagttatgaattggatatgatgaaatttatgacttaaacaaatcaaaatagtttaaaatttttagtcttttttttttccgaccatttagattggataatgaagggttgaggttgggaaagatgagaaagaggcatagagggtgttagttgatggtttttttttttttttctatatatcttttgcacccttaattttaatactttcacctcttttcttttgttgtggtttaaatttttgaaataaaataaagataatagtgatttttagttgtcactatattaaattattttaaaattttaaagttaacataatattaatgtttctaacgaaaatcaaaagaaatgatcaaaatgagatactttaaaaatttaaagtatcaaaataaaattttcaaaacttaatatattagaataaaacaactacaaaacataataaatcaaaagtgatactaagtcaataatatataattcactacatttaaatttaaatgtggagcaacaatttattttaatagaaaacttgtgttagagggggaccaacaagatttcgaggaccccttttctcctctcttctcccttggaacatttaatgtatatatatatatatataaaagataattagtataaaatttgtaaaattagttgtgtttgttgttttattgtaataattaatataaaattgtgtaaagctaattgtatatttgttgttgttaggataataattaatgttatcattatttaataattagttttaattttatgactaaaaatagtaattttttaaaaatcattatttattaaaagttagacgtttataaaagaagaagaaaaaaattcaacttcctttataaggtttctgacttagtatatatgttagaagaaaaaaaaatcaatctgtcagcgacatgcatgcatcgaattaatatctgacttagtatgttagaagatatcatgaatatttatcctattaataattctaatttaatttccctcgctgggagccacttcaaaattcaaattcgactcttcagggacgaaggcacctcactgcgcacacacacctctctctctctctctctctctctctctctctctctctctctctctctctcgattctcaattgaattccaagttagggtttctgaattccctgatatgctgaggagcgtgttagggttcatgatccgtttcttcttccgatccttcaccaaagcgatgggctgcttcttcgcgtgcttcaggatcagagacaatcgccgcacaaacacatcacaattgattacctcctccactcgatccaccgtaacatttcgcatttgtctttgctgttttcacgaattactttatttatatttttaatagtaattagaattttcgctgtgtggaaacccagggtgttgtggtatctcgaaatcgctcgtcttctttattatctgaaggtacttttctttgtttcttcgttttctttcttttcgcttttacattttctttttttatttttcccgctaattttgtgatataacctttttagaagagagagatgattctgcgaggattgatggtgttgggtttgagggagatttccaggggcttaaggatgaggtattttcatagtgctattaatattggtattgcactattactgcagctgaaatgatttttttaatggtttttctcaggtgtttggtctttttaatttttgtattttttgtttgaactagttagggcattgagtaaaataaggttcaatttttatcttgtgaattggcgttaacctgggcaaaatggaatctgcaaactgacatagtataggtttcttagttgttcttggacagttttgaattgtaaattttacgaaccttcatgaatgtagtataaagaaaaaatatggaaagcaatagagtgatttcataaaccttttctgtaaaacatactggaaacaattgaataatgaccacaattaggaccattagttagcttttttcaattttggcttgtgaaaagtcagtcatctatcactctttctatgatctgctgtgtcctcatgttatacctgttttgtatccaatgcctagaggattatacttgcaccatggtatatatcaaatttcaaatactttcaagttactcatagaattttttttttttttttttttttttcttcttgcattttttatggattgtattcattttgttattgtcaattgaattttttatataaactctttctacaggctaagtttcttaaagcttgtgggaccttagcaggaacacctgttgaaattcgtaaagcatctgagaatttgaaatcacctgctcctgataaagattcagacccttcaagatttcattcttggcttcctaacacgtctgtggagaaactgcagctggatgtccaaccatttgatccaccaacacccataaatctttgccaaaagttgggaaatagcatggattcatttgagcacacgccaagcaggttattcatgactttttttttttttttttatgttaatgctgatattgaatgataatgaatttgaacaagtgatattttagtcaatttgcatggtaggtgaatcttcgatttttactcaatttttatagtaagctttagatacattctcaatagttagagctccttggtatagcaactgcattttaactataatatagaatcagacaattcgttctgctttaaaaaaagtgcccttcaaatggttcctgcatcctttctttcatattttggattttagataattacttaattgtatgattgttggttggaacttagaattgtccattgataattatattggagggaggactagaacctgatcagattttaatttcatttcttttgcagctgtatctccaaagcacaagatactgaagatgactctgttgactatatggaaaaaaattggtcagggaaccttcatgcggcagataggtctgaaaggaatgcagctttggtttcacctttgctagccacatatactcagagaaagaacaagtctgttcgttttgaaagtgaaactgacttggcaacctatggaagctcatcagatgattggcatatgaaggaaaacaagtcaccaaatagccaaagtgcgcataaaccatctccttatcctaccccattgaagttatttgacgagatgcaaacaccaggaactctgtaccctgcatcattagaagagttacgtaaggctaaggctcaagttcggtcccagtttgtctatccaactaacgaaccaggtgataatgtcttctggtgcaaaatactcaaggagagagattttaaccttgaagaagattcaagtgagctgagtgatttggttgagaaagctcaaaatgaaactcctaccccagaaaaagggtccaagaaattttcaaatgaaaatgacgatgaggtcaattcaaatttgtctactagaataagtcctgtgtcaaccatcgaggagcattcgcctatgtcattcaagtggtggtatggcaatggcatcccgaattcaacaactaagtacaaggaggtatggcttgtaatcattatcattatttgttataaggtttctaaatctatctacagcttctgattagtgcttattgtccctaggaccagaaagtaaaatggcatgcaaccccatttgaagagaggctggataaggcactgtgtgaggagaattttatatctcaaaggtatctctagttaataacaattgattgtcatcggtttacctgataagaaggattaaaggagcaaaaagaagaaaaaatctttgtaaaatttctgttaaccatgacaaaaatgacaatttcagttttttttttttttggtgcaaatgacaatttcagttggtgcatgttatgctttccatatatataatgtgctggatgttagtaatggttgatttttgttgaccatagaaatttcagtcgagtttaacacatttgaaggataaaaagtcattccaaatggttgaggaatacccatttgttcggcatgtctagttgcatctaatccactgtttttataaattatttgttttattttgttggggaatttgctgtttttattttgaaatagctgtattgtgttgttttatttctaacttgttgattcttaatatatgaatttataaatgtccttataatttgatatttgatttacaggaagcttgtttgtgggaaaccagtggaatttgatgagattgaagaaagtgatactacattatctcagctatagtcggagactcatttgctgtctgtggtgtcattttgatatctgtatatgttcatcccatcccgttgtagtcacttatatgagaagtaattcaatattctggaaactaagtacgaataaacatcattcagcatgctggttgctttgtatcagcagttgattattcaaattttgcagtaccatagaactatatatagtttcatccctgcgtaagcagtgaggaaaattttcattcacaggaggaaagtgatagaactgaatggttttggataagaacagtaggaagcttagatctgtccagtcagatttctttcatgatttcttctcatgagtagctgctgatcattctgtgaataaattgatatttgttagtcgtggatctaaaaaggtgacattatttttttggtgaaaaagtgtctatttttttttttttaaattatgttgaaagacttaaaataacaattggccagtcttttgagggttcattctataatgtttcccattttaataaagagaagatcattattctttcctagagcatttacaattacaagatttctttcacaaatagtggtgctgcaagagatctttacctaatttcagtttgagttgcatttttttttaaattttgtaaaaatataatcattttttactttatatgttgatttatatatatatatatatatatatatgttaaaaattgattcaagagacccatctgattttttttaatcaaaggcttggttgaagttctttatattatattgtattatatatatatatatatatatatatatatatatataatgtttccagtgaatgagttaattcagcatactaaacaatagtgactcaaataatatgaattatcacttgacatgtaaatttatataactaaaagatacagtgcttgagttggagaggataccttcaattcaattaatgtcctaaaataagatccaagaacaagaattaaaagctgaaatgaagacattgttattatcaaactgaatttctcttcattccctattttgtcatctgggcacgttctaccttttcaagggtttaagtagtagcgcgtttgtaaacaaaatgataaagtgtttcgaatgcattttgatcaatttcctgccaatttagtcagtaatagtcgatcactaccacttttatttaagaccatgtgtgagttagaaagactaacacgcaggaaaacgtattttgaatgcatgcatgccctatcaattaaacattgatccccctctttctcacgtggtgtccccaaatctcacccatcaacctcagttttgtttgtgttgatgtagactttgtttgactatttcacatgtagaggcactataagaagtgtaactaagcaacaataagtggctcttccaattcactcttgttgaaggatttttcaagagaaacaaattaaccatggtagtgaaggtgtacggacccagctgtgcttccacaaacgggtgctagtttgtctggaagagaaggaaatcgaatttgaggttatccatgttgatatctttaaggggaaacagaagaatcctgagttcctcaaattacaggttcagctcttccatctatctatattccttccgttcttgttgaatatgattagagtcttcaagattattatttgattaattctgtattttctgattataatgttctttattcgtaatatctgcagccctttggatgcgttcctgtcattaaagatggagattacaccttatatggttacactttgaactcattttcttgcttaatgattaatattgtttctccggttcaactaattttggttctactcttacatggtacctgctaatttgagtgctttcatgtgtttctgcagaatctcgtgctataatgagttttattcagaaaaatacaggtctcaaggggtagagttgatggggaggacagtagaagagaggttgtggaacagtggttagaagttgaagcacacaactttcacccaccagcctacaacttggctcttcatgtattgtttgctacaatgcttggagtgacttaagatcccaaggtgattaaggagagtgaagcaaagctgggtcaggtgttgaacatttatgatgagaggctgtcaaatactaagtatttggctggagatttcttcagccttgctgacattagccaccttccttttgttgagtatgttgtgaacaaaagggagaaagggtatttgataaaggagagaagcatgtgagtgcatggtgggatgacattagcaatagaccatcatgaaagaaggttctccagctctacaaggctccaatctaattttgaatggacttcatggaaactgaattattagtatctgttgttatatggaatggcaacagtatcatcattgaatatatatgttagagaagaataaatgaacttttaccaaattccaaagaaagttaggaattgaggaagaaagtgggtaatgttcaacctcatggaatggaatgtgttgatttgtacttccttgatctcctttttattttcagttgtgtacttgtgtggaatttggatattcctcatggtcatgttcttagcattcgatctgtttaccctctatttttcttactcaataagaatatatatgacgaatgtttttccaaatggctcattcacatgagacattgatcactttgattctctgccgagtaaaaaaaaagtttaatgtagtattatatacacaagtcatgagactctcccaattaattaacaaatgtagtattagtttttttagttggagtgtcgtcttatactgtagttataacaatggctttccattagatttgaactatgtacaagaggttaacatgttatgagtcttcacctaaaaaaagaagaggctgtttattttaaacatgttatctggtttaataacaaaatataaatatttaaatataaatacttaagataataattttaaaaaatatagcaaataataataataataataataataataataataataataataataataataataaaccactgaaaagctctataatagcaattttgatagctattacttttaaaataagatttaattatatttttgatttgttagatattaggatatattgtgcaagtttaataatatctcaggttttaattatattaatcgagtctctaaattatcttcaattttacaatcaaattcctccatcaacgttacatgtttaacagactttgctaacatgacatggatatgctaagttagcatgatgtcacattgatagatgttgatacacatattgacatgttacaaacatactaatgtagtgcttgatggttgtcacaatttgatggcgtgatagttcgaatctcatctccattactaaatttgtttctcatcacttttgcatgtaacataagcattacgtcatcatttaatgtcaaatcaatatatatgtttaggcaatatagcaaaaatattatatttagcagattaatgatagagacttgattgcagaattaaaaatagttgaggacttaattagggcaattagaacataaaaaaattaaaataatataattgtgaaccttgaaaaataagaaatgcaactaggcttgataataaccatatattggttaggttctttacataatttttccttttcgtacatacggagtttacataattcaaattcgtgttccaatgtactgtttttcaaaaggatcaacttaactccttagcgtgaacctgtggaaaccatgagttacttcaattccattcttatttaagaccacatatgtaagttattagcaaagactaacacacacacacacacatataccaaacaaccaaatattttgaaaacataagcgcacctgaattattgacccaagggaggaaataagatcacgacgtatgatcttataatctaatagcccaaaaaagataaggacccaagagtctctccagaagcaacaaccagtgagtttctttctccacttaataactattaactaatgaaaagtgattctcctatgctgcatttctgatatcatttatttatacaaatatgttattgataaatatttctaagatattagttaaagttaaagaaaaaatatttattatttaaattgtaaaaaattgtaaaaaaatttataaataacataattttttttaataaaaatatttttattttaagtttttcaaccaatatttttaaaatattgattaccatttaccttttattaatctattaactaaagttaaagttaaagttgtttacgcataacattaattaattgattaaaattatacaataaatattaaatattaatctcttgtttaacgtggtgtccccagattagatcccacccatcaacttgatatttgttaatttgcttgctgctttcactgaccacttgacatgtagagctataagttgttttgggtcactaactaaacaataatatatatttgctgatcaaacctgagtaatataactatataagtggctcttccatttcactcttgttttgaaccatttttcaagagaatcaaaccatggtagtgaaagtatacggtccccactgtgcttccacaaagcgggtgctggtttgtctggttgagaaggaagtcgaatttgaggttgtccctgttgatgtcgataagggggagcagaaggatcctgactacctcaaactacaggttcaactcttctattttcctttttttttttgttgaatatgatttgtcttcaattctttatcttctcattcatgttctttattcataatatctgcagccatttggagttgttcctgtcatcaaagatggagattataccttatatggttacactttgtgctcctttgttctgcttttctacttatatatagtttgttggttaaactattcacttgctttttatatctctctaagttttagagtctttgtaagaaaactatacgttttagcgttagaaattcttttatggtgttagcatgattttaaattacgattttaaactatacgtttgacattgcggtcgcaattgtggttgcaaaacactatttaaaatcatgggtgttagcaatagaatcaaaacttaacttgtatgtgtagggactaaaactcaacagttttctgaactaaaattaaaaaagatcaaatgattaataggttaaccaattttgttgatctatgattattgttccttcagtttttgttactggtaccctttaatttgagtgttttcatgtttttctacagaatctcgtgctataatgaggtattatgcagaaaaatacagatcccaaggggttgagttgctgggaaaaacaatagaagagaggggtcttgtggagcaatggctagaagttgaagcacacaactttcacccacaagcccacaacttgtgtcttcatggtttgtttggttcaatatttggtgtgactccagatcccaaggtgattgaggaaagtgaagcaaagctggtgcaagtgttgaacatctatgaggagaggctctcaaagaccaagtatttggctggggatttcttcagcattgctgatattagccaccttccatttcttgattatgttgtgaacaatatggacaaaaagtatttattaatggagaggaagcatgtgggtgcctggtgggatgacattagcagtagaccatcatggaacaaggttctccagctctacaaagttccaatctagttgctgaatgagtttcagggaaaacagctattagtgtatcatctttgaatatgttagtccaaatgtacttttagcatattccaatgaaagtgagggattgaggaagaaagtgggtagtgttaaacttaatagaatgtgttgaatttgtgctttctttcattttcagttgtttgcttgtgtttaatttggatattccttgtggtcatgctcttaactttcctgttgtttaccttctatttttcttttgctattgaataaaagttatatgttttttttttttttacttcttatgtttttttagtaaaaaattagaacccacaatttctttcctttcttttctcttcactacctgttctggggtaaatattaattacccttaatcgcttgtaaagccaacgatcctctacgagacaaaaaacatatgacacgttccgggctaaatattaactgagtctgtcaaggacaccttaaaccggtcaaataacagttaaaaccggtccaaaaggacaaatccataaatgacttagcagactatggtattatgttaataaatctcttctcaccattgagtatggctgcttgaagatgcatgatctaatacaagatatgggtagagagattgttaggaaggaggcaccaaaaaatcctggccaacgtagcggactatggcattatgttgatgttattgaaatactaactgatgatttggtaagaatcatgtatcttttgttttataaattatacattatagtctattgtaataatgacaacatgcatttgacgttacttgtttgtactttttttaaaggaagtgacaagattaaggggataatgcttgatcctccccagcgagcagaagtagattggagtggttttgcttttgagaaaatgaaatggctcagaattctcattgttcgaaacacatctttttcatctgagcctaaacatctgccaaatcatttgagggtgcttgactgggaagaatatccttcaaagtctttcccatcaaaatttcatccgaaggaaatcattgtctttaatttgcctagaagccatctaacgttggaagagccatttaaggtacaattgtgtagaatgttttcttgttctttctacttccttttattttttcatttaacaaaagcttccattgttactcacatttaaaaataatagtataacccaaacatgttgctaatcattgtactaaccttttctttctggcagagattttcatggctgactcagatgaatttttcacataaccaatcaatcaccgaaatgcatgatgtttctgaagttcaaaatctaagggaactgagactagataattgtagaaacctaattgctgttcataaaaccgttggatttctcaaacgactttctcatttaagcgtttcaggattcgtggtcttccaggatgtaagtggaagggcgagagcgagacagtattctcttcctgaacttgttgatttgcaccttattatcaatggcactcgatgtgttcctcaccacaaaggctattacaacttcagagttgcagcagatcacgtcttaatttgtgatctacgagttttgttcagtgacgaggagtggcttagccttgatgcagtgtttctcgagcacgagtggattgtagtgcaagtttcatacgaagccacgtccaccttgacgctaagttgttggggagtctttgtgtatgaagaattcgaaggagcgaacaacatggaagatgtccaaatcacgtgtccagaccccaagtattcaaacatgttgttgtcaccggcattagttcctatgaaagatcctaagcaggaattaatggaaaaagataatagtggaattacctctacacgaaatgattaagcggatgttcattgaatcagtggactagtatgaaaaaagaaaggatttgcagggtaaaggtttagaggaattgtattccctaattggatttataaaggagatatctacgcaggctaaggacaaattggaatccgaacaggataataaaaaaacactccctcctgacatctttcctacatgtactcgaaacaacgcctttcctagatgcaatcagtacaatgaaagttgtagaagcttcaacctcaggccatcagggaagtgatcgatgaggaacaaggctatgatcctcactctgagcatcaagaaatattgaggggaataatatatgatggaatgacagatggacatagctttccttttctggatattgttaaaaccagaagtgcagcttaaaacagcagtaaatgggttaaattgtcacccaattggaatgtggtactacccacagttgcaatgaggatgtacatgattggaattatcaacggactccttgaggcaaagctgagctttcgtgatttagacgaatgggcaacatcaaattcaaatgccgttttaagttgagcctgataaggatctcgcactgaaaggagtgaaggaagaacccggggacgacgaggtagaagaagcttcatcctctggccattagtgaagtgatgagaaacaaggctacaatcctcagctgcaacaattaacgaggcaaatatactatgatgcaatgatggatggacttgttgaagcacagaatataacatgttatgtaggacaggaatggaaagcctccatgagatcattcgccggtcgatacgactaacggatgaagtgaaggcagctgtccctgtgggtgttgtaggagaagctgtggctctacaaaattattagtttccttaattgataaatgtaaaaactaattaaaaaacatttaaaaaatcaaatattatttgataaattttaagttaatattatttattaataccaataatttaaaaatttaaaaatagaatttgaaagtcgtaaaagatcataaaactttggagactttggagtaataaaaaaatttacaacttcatataaaaagaaaaaaaaaaaactaaagttgttcagctttttttacttcaataaaaaaagttgtcaattttttatgagtattaattcaaaatttgtttgataaatttgaaaaggaattatccttttggtcattcggccaaccaattgagagaagaaaaaagtttagaatctaataattaaaaaaaatgataaaagttaaaagattcgcagaactgacaagcgcataagtaatttatatatataacaatccagacttctcacagaaggaaagagaggaacaaaaagctttcaaaaattagtgataagataagaagaaaaaaatcagataaaaggtatataaaaactgagaatgaaagcattaacatttagtggagattgggagaaaatttgaacgttaaaagataaaattgtgaacattttaataatctctgaaaataattaattaaagagaaaaccattttttgtatgaggcacgtttcaatgggcgcgcaagagagataaatcgaataatttggactccatctggcccacttaaagcaatttcatgcagacaagcacacactttggttatacttgtttgtttgtatttatatatacacttaaaggaaagctaaaccatatcgttatgttgtaacctaaaaaaccatgagccttatgaagtgttacaaaacacaacaatttattaatagcagcttttggtactaaaagccttgctcagtagcataccattggacttcttcctcagtgtttctttttgaaacttgaggggattttgacaactagtcgcggttaaaaattttcaaataggtgttagtctttaatttatgatttttatattttggtaatatactactatcaatcaatgttctttagctttagacggttttatattgctttttttattagtccagtgactttttcctgccagaagtaaaagaagtaatatatgccacacttaattaatagccaacactatggagtgaaaatttattaatgtgatatatagcatcacacaggtccccaattctgccatcatgaaagacctttagtggatatatatagaaccacatactcaattgaaaactaagtaacaagcatgcgggtggtcaccaacaactaccatacttaatttgccagttgacatttaatgttattcttatcagaaatacagtaatatttacacacaacaaacgttttgatattgttcgggaagtacaagatactacaattggaaatatagtatttttcagtcaagtaaacgtgatttgaattaatgatacaaattgtgttatgagatcaggcttaaaattgacattaatatcaaacatggcacattcaattcgcatgtctctctaggccactgccagtaaattcatgcgacccttacagcctgtgcattaataagccaatcaagtagtactgccatggtgaattaacaagcctagctagctacacagttttaatattcctgaaaaatggatggtaaggttggagaaggaaaattcattgtgagtgtgaccaaggaggaggtagtggtaccagagctttcaatgaaagagcaatggctgccactatcaaaccttgatctactcattcccccagtagacgtgagtgtattcttctgctacaaaaaacctttgcctgaaaaatattattgctttggaaccatggtgaggtcactgaaaaatgcactggctcgggctctagtatactattacccttttgctggtgaaatggtggccaacaccatgggtgagcctgagctgttttgcagtaaccgtggggtagatttttttgaagctgtagctgatgttgagctacagtgcctcaacttgtacaatcctgatgacactgttgaagggaagcttgtaccaaggaagaaacatggcgtgcttgctgttcaggtgatacactataaaacaacttgataaacaaacctatatcttgaaaatgtttaccagcatatgttagctagtatattagaacataggttataaaactaaaagaataaagtttttttattgagatgtcaaaaattatgttagtgatcataattaattttttctatattttcttataattttacattaaaatcttttttctttgaattttttagcaagtattataagagtactggttagtcaaacttatttttatacttctttgattttttttataagacctaaatttaaaactgtgtttgttcatcgttaaaagaagaaaaagaatatattaaaaataattaaaaatgaaatataaatgataatgataattttataaaacattaaaaatttaaaacaaaattattgatattaattaaattaattatttttttaatttaatgaattagataattgagttttatatataggattaaagaaatgaaatattaaaacatctttagtggtagatttcaaattgagattttagatatttttttttgtagatcctataatgttatttaggatgtaagatttctctcatcttttatattggtaaatctcattttgaaatcttaggaaagaaagagataaaaaattattctttgaatattgtgcattttcatgattcttctataacaactcattcttcataatgaaaatttgtttatcttttttattagaagatctaataaagacgaaattttaagctgaagatgtttgctcatacactaaatatgctctaaataaaaaataataatcttggttcttaaacgcgcggaaaacatattattaattatttatcttataagacatgtgagttttgcaggcaactcagcttaattgcccagtttagtagttgcatgtactttcgaccatcgcatagctgatgcctactctgcgaacatgttcctcgtatcatgggccgaaacaacccggcccaacaagcccataatagcagcccagccatgtttccgacgttcccttcttaccccacgacgcccaccttccatccacccttcactccaccacatatacgttcccgtctcggcgctacctccaccgtcagatcctaataagaaactcgtgttcaaatctgagccactcatcagccgcatatactacgtcacaagcgaatacctgaaccgcatgcaagcactagctagctcaaacggtaccgtgaagcgcacaaagctccagtctttctctgcattcttgtggaagatggttgctgaagcaactgctagtgttgatggtaagaaaaacgttgttgccaagatgggtattgtggttgatggaaggaagatgttatgcaacgatgaaaagaacatgagttcgtattttggcaatgttctttcgattccttatggtgggaatgcggttgatgagcttgtggaaaagccattgagttgggtggcggagaaagttcatgagtttttgaagatgggtgtgacagaagaccattttttagggcttgttgattgggttgaagtacaccgacctgtgcctggtttgtcaaggatttattgtgggcatggaaaagaaaaaggaccaagttttgttgtttcttcagggcaaaggtttccggagtcaaaggttgactttgggtgggggaagcccgtgtttgcatcgtaccattttccttggggtggagattctggctatgtcatgccaatgccttgtgctaatgggaatggtgattggttggtttacatgcaccttctcaaggctcatttgaatttcatggaggttagggctcctcaaattcttaggcctttctcttgggatcacctccttaattaatcgtcattgcctttgcttgttcttcatcaatcattcaacttgttgatttgtaacaagggaaaataatttctagtgtgaattttatccatacaaatagtatcaagtggtgttggtgtgacgctagtatttatttttacttgtaatttttgccattgcagtatatatacatattaaaatacgataatgatatagtttgtcaatatattcatattaaaaaaatataagtgtgtaaattagtaaatcccttaattatatgggtaaatataattaattttacttaaaaaatagttgagaattaataaatgaatatataaaattaccgtagacaaaacttttaagctaattaactataatagatgcatgtgcaactgcagttacgcaacatcgtttcatttcgttacccaaaagtgtatactcgatccgaagctctgaaacttgaaagctaccaattacaatcatctctctgcgggtagaataaggggtcgttgagtgggttattcggatgacaatcgctgttagcaactcagcccacatttcacgacccaagaggactaggcatattgcttcctacaccagacgaattttcaatatatcccgcactaaacattacaattccgatattaccctttaataaataaaagcttgtaattcataagagcattatgaattcgtaatctataagattcatacggattggacaatccaaatcaactgaactaacaggtcatttatgttaaaaaataattaatatcattatatataacattaaaatttctaatgtatatttaatacatatataagtttacataataaattttataataattaatttttatctaataatatatatttttacatatataaattttataaccattctacgatttaaaaaagcaaaatactttcacccttgtccgatcctgatcctttgccgaaattcatgttgtctacttaggggtttctcagcctatagggtattattgtttgaacacctcgaaactatcacatctttctgttctatttctttctttctttcttcggatgtaaaatagctagcgttgggttctctatgaaacatgtaaaaagaaaattctgactaagttccttattgtttattgcttgacaatattaacagctcacaccattaacttggttctgattggttatcgtggcctttccttgatcacccagctagctagttgtccacatacattcaccataaaaatggagagaaaaagacaaagtcctttcgggattctaaaagttcatgaaagcatatccctttgaagctttgacatggaggaagaggaacaacttaatttgttgtcaatgtgacgccaacgttcaaaattttaaactacgctaaattccatccctcataaatgcttagaaagagttatttaacactcaaaaaaattaaggaaacgtatgaaaccatctccaagaatctagacgctcctgaggacaataagttaaaaacttgaaagagcccacttgcgatttgatttcttatctactactgcaattagctatatatagctggcagcatggttgagttatatatgctgaaacttatattctgttgattatttattattatagcatgcagttgcattgctttgattgttatataaagggtatttcaagtcttggcatatttgactttgactacaatccttacgtgaattaattatttatctttaacaaggaacatttcaagatgtattataaaatgactaattgggtgatatttgacacacacaaatagtgaagtggaacttttttaatagatgtaattacagaataattaattattcatgtgatagagaaaaagaaatgtttaatgaaatgttttatgcaaaattaatttttattgcgagtttccgcgggttgtattgaaatgtttaattaaggtgcaatatagtcagcatttatgttccgttttacttgaagagttgatgttattaaaagaagaaaccaaccgtgtgaacttccaaacttgtcgtattcgtcgtagaatattttatgcatctgaattggcatcaaggttaattaattgtggtaggaaagaacaacatcacgcatattcgtctttatgctctaattaatattttaaatattctacatttgaaagcctgttaggcagtttaagctttggttcaatttctgccacgatagagaatggaaaacgttcataagttatttggagatcagctccatgaagttgacacgaatgaagtgcacgtggtggtgtgcttcaatttgttttcgcatacccatgaggttgtggctgaggccccaaggaagaaacttgaggctcgaaagtcgaatattcctctggcatctcgtgtttcatgactaaaaagactttacagcttttggttattttagtttatcattattttcagcaattaatgaggcaaatattcagattatgtttagataaacttcttccataagttaaaattaacttttataaaagttcaaatcaataatcctcaaatgtatgtcttacttcggctgtcgttttacggttttagagtttaacttaattgttatgtgatgcatgtgatgaagtgttaagcctgttatattaattggattgggtaaaataagatatattcttaaccatttgacttagatagtgcctttagtcaaaatagttaacggggtggactataaacgtaaaagattgataaaataatctacaagtagcattgcttctatcatgtcaggtttcacttcattccaaaattaatcaattttgtagaaaaaaattaattaaataaaaaataaaaaatcgtaggtcaaaaaacacagagctagtttcaattctcggaggaattgataatgaaccataacattaattacatgcatatgttgctgtctctttaccctcataataatatatatatagatctaacatggtatctagtttgtggatcaaatcttcttagtgttggatgcattgattcccttttgtactttctaactcatacttaagtgagtgtgccaattaattaaaaaataacgagtaaaattacttaatgtattattgtaaaatacaatttttttttcctttcttgaaaaataatatatatatcaaataaaattaagtctgcctactaagacattatttagatgtgtaatgcagactcaacaaaaaaaattacgattcaaaatatattttttttatcggtaaaaatgaaagataaatatgagaatttataataactcatatctatttaatcaattgatgttgatccctttgttttatgactctgaatctggacaaacctaaactatacaagtaatgcttacaaaaacactatcaaaggcatttaagccatccattctacaactacacaagcaaaacaaaagataggaccacatacacacgtaaaatgtaatgtaaggttgccccttttttctggggctacaataaaataaagaaaaccaaacaaaattgtgctcaaaatagagaggctgagagtgaagaggatcgtgcattaaagacaaacaagttgatcacgttaaggattacaaggacactgtccatacattttgacatgtgttaaggctataggattacattcacaatttcctctatatctttgggcaggttctaaaatttgtgacagcctcacaaacgaaaaaaaacctcatcatagttttgctaacacaattatacactcattctcaaaaggttttcatccaatttctttccctctcttttcattggtgtgcactttcacttgtggagctgcaccaacagcagtaaaaattgtgccttgttcttgagatgtctggtgttcttctttgggtgagttgtggacccaaagagaacatcaactccttggtgagtttttcatgcaggagtagtagtggtggtgaaagaacacaaaagaggttttctggaatcagttttgctagtggtgcttctgctttttcaagtgcagtggcagctactgagacttcaagatcctcagaggagagggtctatgaagtggtgctgaagcaagcagctttggtaaaagaacacaaaaggggtacaaacatagctctggatttggacaaagacgttgaggctgatttcaacaatgtggatctgttgaatgcggcttatgatcggtgtggtgaagtttgtgctgagtatgccaagacattttacttaggtacttgctgctcttttgttttgagccttttctcattcatttttttctgattcaaatgaattttagtcctcttattttgttcccccatcatatctaaataatgtctctatgtctccagaaaattattaaatggttcaaagttattatgtgttcatgatctcagttaatctttgcacgatgacacataatgaagttttttaatttatgacaaatatttcataaaattcaatgtgtcatgtaaagattgtgggagacaagagacaatgatggtctcagaccatctagtaatttctcctcttccaccacaacgttaatataattgaaatgtttcttttgttcctaaaccttaagtctaattacaaagttcaattcatatgatatatgccttttgttttgctgggtacagaaaagtacttagcagctagattaaaatatttttactatttttaatggattttaaaattttatttgttaataatatattttgttgttgaattgactcatcttgaaaactgtatactctaggcacacaattgatgactgcagagcgccgaaaagcaatttgggcaatttatggtatgtgtgattagattatattacacactgctacttcagcttctccagtgagagttgttttggaattgacaattattcattgcgcattgcagtgtggtgcagaagaactgatgagctagtggatggcccaaatgcttcacacatcacccctggggccttggacaggtgggagcaacgattgagtgatgtttttgaaggccgaccctatgatatgtatgatgctgccctctcacatactgtctcaaagtaccctgttgatattcaggtactttacatgcccaaatctaagcattacatcattttaggacaaaccttacataaaaagttctttagttgattttgatgttgttctctatcaaaatgggagtttcacctttgataatctaggttgacttgacatttatgtaaacttttattatgcatattatcaaagtgaaactccaagttgggataaagaataatgccaaaagcacctatgcaactgtatgtaagttttatcctttagatataacatgttcaaattagagactagaagtaaattggttatcttatacagaatagaggactaattctgtcgaaaaacaaaattataaaactagatttcaccttcttttttatgtgctaaaactgatccaaatgacattgcattgtctttttgaaacagcccttcaaggacatgatcgaagggatgaggatggacctgagaacgtctagatacaataactttgatgagctctacctttactgttactatgttgctgggacagtaggccttatgagtgtcccagtaatggggatagcaccagaatcaaatgcttcaacagagagcatttataatgctgcattggctctaggcattgcaaatcaacttaccaacatacttagagatgttggagaagagtaaggttctttgaacacttcaatgcattgcaattaaaccaaaaacaataaacaaatggcattgaacctcttgtcactcaagggtatctcacatcacaattccaagaaatgaataaaaataacaacattaacaacaaaataacacttgtttcatacaatcaattaagccaatgcccctcaacattcaattttagaatttaattatatagaatatcatatatgaaaagattgtttattttataagaattacttttctaatataaaaatctttaatgtacatacatgaaagttaaactcttaattttaattgtccacatcattcaaattatgttttgtctaacttggtctagttcttgatcattatagtgctagaagaggaagagtatatctcccacaagatgaattggcacaagctggcctttcagatgatgacattttccgcggaagagttacagacaaatggcggaaattcatgaagggacaaataaagagggcgaggatgttttttgatgaggcagagagaggggttgcagagctcaactcagctagcaggtggcctgtgtgggcatcattgttgttgtataggcaaatattagattccattgaagccaatgattataataacttcacaaaaagggcatatgtaggaaaagtaaagaaactcttgtcactacctactgcctatggtttttcacttctaggccctcagaagtttaccaatatggttaggaggtaaccgttatacaatgtgtgatacttttgagttagaactgtatacatctcaagttaccagcatggttgaagagcaacccattcatttaatcagtttgcaagcatataatcagttttaaaatgtgtaaaaaaaagaaggaaaaatgtgttaatccatttgtatattataaatttcagagaacattcttcaaagggtaacaacattttacttttgagttacattttttatttttattttctggtatatgacttagagctttcttatcaaatcagaatttaatcatccttaattaattactcaaaaaacaatatatgaatttctttaacttttaaatcaatctttaaatcaaattaattgccattagatatttacaagttacctcgaaaacaatcttctgcaatttacttttgagacttttctaaactaaaagttttaaacaaatgtatttttttctcactaagaaaaactcttctattattgaattagtatttttctatcctatttatattttatttgtatgtaaaaggtcccattcaatgggggaaaacaaaaaaagcttggtaattttataaacattgcaaacttgcaagaattatttggtgattaattaagagtaaattacactcttatctcctctctttttttaattgcattcgatatccttccttttttacaccctacaaaaaatctcttaattgtttagctcacattacacatagactctctctctctctcctaaacaccttttgataatttaacagaaaatagacacatactagtcacatgatttttaatgaaaatttatgtctaaaacaccatcacctccttcctcaaaatcacattttggattttacaaatcttcctcttgtttaacaacccctcttcacttaccaccaccacctccttctcctcctcctctctctcccacgacaatatcatctcttcttctcattgtcgtcctcgcccacttacatggcgtccgagcgcacccacttatgccagaacgaccactgtcaccgtagccacaaccttcaccgtagccatcgtcgacactaccatatccatctccaccacctcctcgtcccttgccgtaacttcggtcaccatcaccgctgcctcggttccttagacactaacaaaagaggtaaaagtaatgtataaaaaggaagggtatcaggtgcaatttgagaaaaacataggagatgcgagtgtaatttactctaacggacaatttcgtctgctcaaatatttcaattgatattagttaacgacgttaacaaaaaaagttaaaagtaatgtataaaaagaaaggagtaccaggtgcaatatgaaaaaaatgcaaatataatttactcattaattaatcaatgttaaaagtggcaattatattatctagttaatgtgtgtggcgtgcttaagaggacacccttttttcgggttttctatcaacaagtttcttgattctcaattatatggtgttcaatcttctcattcattcctaatgtgagacttcacctcaaacttgtattataacaaatacgaacaaaagattaagaaaagaaagaaaaaatggagaaatgacttgccctttgaaatttagatcctcttactctggattaagataagaaaaaaaattaaaaatcttgagactctccatgagttgtgctggaatccatcaatcctttaatatataaataatttatggcttgatgtctgataatgataacataatctcacgtgttattgttgaaaagaaaaagaaaaactaatttcaccttttaagttggttggttcgtgtaacatcacaattatcatttcattacaactaatgacttcaacagtaaaggtgatattcatcccactagtctttttagatgcccaattatattatattaatatatcaattctaaaaaatattctaaacaaaactcaacctagcaataagtccacattaaacctttcattactttgttgaagataagggttactccttgttgcaactgaaacaagagtttagtttttttatgttttcaatatatacaattatttcggtgtacaatggatatatatacaatttagcaaggataatcaattaaaaatgactttcaaagagtcttgcatatgatctttaaagtaattattagaggaggtaaaaatttcaattatataacaatctataatcagataacaacgtaaaaaataaacacttttgggtcttcgaaaaggaacaaagatattactagaagccaattcgtcttttctttttcttcttctcttggtacaacaactataagaaactaaatcaagctagtaaaaatctcccatgttcattagaaaaaacccctaatttaacattccatcttattttttctaaatattccacagcttctacttgcaagttgcaacactctacatagaagaacatggacttcattttctccttactctatggttaagaccttccctacgagttgaggaagatgaggaagacaccgcagatgaaaaacaagaatggttattttcagccatatccttgtgaaatgccttctgcacatcatctttaagctccatgaagcgtgctttcttgattctctgctcgtcttcacttcccttctcaaggaagaaaacatctggcatttcgtcatcttccagaaacttatcaagcacttcagagcaatggggaaagaagcgcctaccattctcaactgtacataattcaaaaagcattctcagaattttaataacaacattaaaccaccatcattcttttcctctacaattgcaagttgcattaaattcatttccatttgtgttaagctgtaaagtactacaaatgcatggttagctctatcataagaaggaaagttttaagttccatttgatatcttatttggtacgctatgatatggtctacttagattatgagaaacaatattttgtttcagggtgttccttttaacttcactagcacactagaaatctagaattgattaaggttggatcgtagacatgctttaaggaaaaaataagtagtgttcaatgctccttttctgattggtgtactaatcctataacttgtctcttatccctctgatttggtcttataacactcttgtacatgagttagagtatcccttgcactgtgtttttaaataaactttgcttatatacaagtgataaaaagtttctttgttaattagtagttactacactccatctgtgtaagtggaaagttttatttttacttttttgttggcatgcatcatgtaattctgagattttcacaattgtggcatgttccaaccaaggcaacatacaagcaagctagacttggtgttaatagaataaatcatatccacattccacagatgcataacctctataaggatgctatttcaaaattgtcttggacatacctgttttcataagggcatgcaatcttaactggagttttttggttcgagcagagggagattcatttagatctacttctttcgggttgccatttttgcccttcaaagccgatgaatatgcgtacagcgatgatgaatctgcttcagcattctcaatggctaccctagcctcagcaggaaacaacagccgagcaaatgtaactgcaacatatggagcatgttaatttcatgtccataggcttccaaatttaaaagcatcatgcaaatatagttttgttgtggttatgatgcatgcatattcctaaagtaaaataacagcttactggtattaactatgcatttgtaattaataagttaccattactactgtaattaggaggatttgattgtgcacagatttattcccgatttggaatagtttcattagagtttatatatttgtatcaatctatgtatttttctgaacaatggaaaataatattctggattttaccctttcaactttccaactcaactaaaaggtccaaaacccaatattcatagaaacaaagcgacctagacaagagaaagccctacctctatcttcaaggtaatccagtctcatgtgcaaatcatcagctgttaactgtgatgaaacagacatattcacaatcatagaatttcttctcatctccctctccaggacatcaacacagagcctgtccttgttagattccttacactgcactgttttctcatgataatccttgcatcttgtcaacctctgacaaattgcaagagcggtttgtccatctggagtggtatctgatgcacgtgcccctttattcagtagtgctaccaaaatggatggatcctttcgccttgcagccacatgaagaactgtgtatcctcgggaatttctacgaagaatatcagccatgcctagactaagaacttcttgaataaccttagaatcgctataggcacaagcatagtgcagggcatatgcatcatctagagtgacactagactcatttagaagaagcttcagtagctcaacatcatcagagtccaatgccttgtggattctcctgatattcttttcattcaaggactccacttccattgcattaggtgtggattctggctgaaatgggagtcggagtgatttgatttcagtcacaacttcatgagggagctctttttccaaagatatgttgtcaaagtcagaccttgctactctctgaatgcactgagagagaagctggtctagttggcagttgaaagcagccataagaataggaatgacatcttccacaacagccttctcaacaaaatttaggagatgccgctgcatcagtaaagagatatttacattagatttgttaagcaaaagatgtctgtctttttttttttttttgggtaataatagagaaacatagaagtaacagagactgtaatataggatctaaatatcatcctcaagatatatgttagaagttaaaagcagcagtggaaaatcagaagagcttagtggacaaaggtacataatgtagtcacaagtgtgcatatgtgtgtgcagttaggctaggtgtacatctatttcaaaatttgttcactaggcacataaagtgttgaacaaattcagaaagacacacatgtaagttggaaacaatttccaaaacttgccaaatgtacaatgtttatctgcttttagtcttaggtaaacattgggatactttaatgggtaggacggagatacaaggtgggttgaatggttaagggagaagggaagtggaggaaaggtcacaggttcgatcccctctactaataaagctagcattctaacaacaaatatttgccgataaaaaaaaaaaaaactttaaccggtagtatttctatgttattcagcccagaatgattttgtagaattgctctgaatttgtcaaatttcttctctttcacgcaaaaattagtaataagataaaggaagaagaactaaaaatgacaaccaaaatacctgaaaaagtaataccagctccttcatctgaaaagtggcagaagcatacatcagctctaaggcataattgatagcagggcggcatgctacatggatacatgtttcatcaacacatgttgtctcttctgttggtgaagcctttagccttccagtatacagatagtacaagaacacttggaaagcttcatatccaactgtgccataaggcaccaaatctgacatgagataccttggctttccttccttccctgatccatcagtccctttcttaaaaagctcatgaaaaaacggactacgcgacgccaatatacagcgatgtatacccacagggatgtcctcaacaagaatctcagcatcactataaccatagtcagcctcaatcaatagcttctcaaggcttccactgagcttattcagactcaaaatttcaatatttgccccatgctcattgctggtggtggaagacacgttgtgattactagaaccatgtgacaggtgagatgatacgaaactcaaggatgatgatgaatcatatgagttatccatgaccccaaatatacgagattccaattgagtcaaagcactgtttgactaaatttagaagcaaaagaagaaattaaacccctttaagtacccatctcaattgaaaagctagctaacacaatctataaccaaacaaactaagctcaaattaaataagcaaaattgagaaaggtcactgtttcgccaaccacaagaccaaagtcacttgcaagtcaagcaacaaaactcagattcccagaagcaaaaactgatatgaattttcatctggggatgatccatcaaataaattgaggcatgagagcaaaaaagtttgaacttttagaacttaactgacatgggaaagatgttaagagcaaaagcagaataaatattacatacagggtgttaccctttgagttaagacttaagagggaagatgaactcaacagcagcttgagagaatgaaccaggggcgaatcttgagtaagagactcttggaagaggcttcaaaacgctgaagaagaagaagaagaagaagaagaagaagaaactgaagaagatggctagtttaacatcaataatgctcaagtcctttgaaccaaagaagcgaagacttgaaatggaaagagaaagagaaccaatgaacaaaggttgaccaacgactggaaagagaagatatgggaaaacacagagagatgatgctcggtaaccgagactccctgtgttcttgaagagaaagaaaacgcaaactacacgttgaatattgttctgtctttttctctttttcttattcgctctcaaatttctcgttttgttagcatgacccaaaatttaataaatattgtgaccatgtccctagttttcatgtttcagcacaattattaatgcatatacaaaacatgtgattggaggaggaaaaagtagttagggaatttaagcataaaaagttattacattcgtgaatcacttaatctctcgcacatctttgtttgttcatttaattcatattcaaaacgacaaatttatatgtcaagtgtatttttgtgttattttttattattaaaattggagttttattttaataatttatgtttgtatgtgttaatttatttttcaaatcgaacttttatctcaataatttataattatatttaatgaaaattttatttataataaaaatttaattgaaaacaacacttaaatattctattttacattaaaatttaaatgagttggattttgaatgttgaccgtctaattatttattaagctgcatttaaattttgtgatgttcaaggtgctgtttttaataagatgaaaattgtgtgatagtttttttttttttataccaatttcctaatgcattgcaactgtaacttatacaaaacgcaaaggattgggatgcacattaaccgcatttatctttttctcttttcggcaaatggtgctatattccgagttatgagagtgtgaaattatagaaacaaagtttggaaaaaaagatgcgatagaatattgaaatatttgtattggccaaaataggaattcgctctgctaaagggatagtaaaaactttagttactgctacagagtacagtaatgtaggtatcatcagctttctgaaagcaagtgggtccaacgtaaatttgtttgttttggataaggatttcagattttcagtgcagttctacgttccagaacatcctaaaatgaacgtgctaaattgctaataacaatttcaaaaaggaatattgaaaaattgcagattctccaacacaaggagcacatttaattacgtgcagatagcatcgttgttcgattggaatttaggggtatcaaattctaggagggggtggtttcagttttcacatttgcttttttttttttttttttacaatatttaatcattattgatcgtacaaaatctaaacatatgtcaaacatatatatacacacacatgttggagaatccttgaaggcttgaactcaattcttggttcttaaaattgagataatttctaaatttcgatttttatgtatattgttttgttcattttttatacctctccaacgtttataaccatttatgtaaagcataaagtacttatttatttttcattaaatttcctgtcgctgctgtcacatttcatgccactaaggtggttggtatagatttttctgaagaataaaaaagaaatggtgcatcatcctgaagttttcttaattatcatttgaaacaattaaaagaacatttaatattttgataacttaaaaatcttaatactttattccttgaatgaatagttaaggttttaaaatacgtagtatatatatgagttcttataaattcatcacatataaataaacagttaagttaatggtagaaattggaatagatgcataaagattaggttcaatcttattattatttgtttgatacaagtgagaaccagcgaaacaaatacgagtatgatgaaagaagacattaatttcaattgttcttttgtttggtattgagggtgggaaaggatgaataaaaagaatgtgaaattcactgttatagtaatctgtccattttggttgggagagagaaatgaggaaaaaaatgaaaactattttttttttacttttatatttactttctttattacgaatatttatctttttaaggaagagaaaataaggttctttttttatctttttgcttctttcctatcaaatagtttacaaaatccttttgtttataagaaccaagtgattattagataatagatatctttgtagagattaaaagctatttttgtttttaattaaataaacaaatactaaaacggagtatatatttaacaagtagaatttcaatagtttttttttttataatgtttacaatcctatcctatttatgctaccagcgatcttagaagaaagaagatattatcagaacgaacgatgaaaagccacgtggctaaatcgcagttggcttagcagcgtgagcgaagataaactccaacgcagcggaacacgtctcttccaaggggacaatggcggttgtatccacgacgagctttggcacgtcaccaacgtcgtactccgtacaccctccgtacccttccagaagcttctccagttcctcccacgtccccggcttgtacggaggagcggagagtcgaggagggcgctgaggccgaggcggagctgcgtggaggcgatttggcagatggcgtcgtatgagagatcgttgaggagtgaggcgggtgagtttagagtagaagtgcttttgaagatttatctattgaaaaaattttatatttttaataaaaaaattcccaaaatcacttataacttttattcaaaagctctgtcgagggattcgaagagatgaggcaatggactttggcaacgtgctttttccgctgccatcgctattatcactgctgactctaattttgccattttcttccttcaaagagccgcaccacaccacacaccacacaccacacaccaattcgatatttggatgcttatccttctattctcatcactgctggtaatgttctagaatttctgattttttcctcattcacaagggattcacttgctaagtatacttctaataattattgtccataacaaattcatcaaataactaaatgaataagatatttattataaaaatcatatacaagtgtaaaaaaattatgattaatataattttacgtatgtcaataaaaaatctttcttttctttaactattatcttaataatactgattagcatctccctttaatataattactatttaacctcctaattcctaaagtgaacatctctcttaaatatttataaaataaatcaagttttctcttttaaaattaatttatgcattccatctttgaaagaaactaagtaaaatattttctttataaaatataattgtataatttgttttatattatgcaaaaaaattcaacttatttcactttcttattttcttaatgcttctgtcattattataaagttcaaataaccaatttatcagattaagtaatttgattaaattacctatataagagcgttaaatttgtcttaaaatactatcttttctcatacaattattcttttgaacaaaactaacacacattaatgaattgtgtttctctccataccatgtcgttttagaacggactttaatagaagatatttttgtaaaaaaataattaattcaccaaaaatttcagattgcaccttataaaaaaaatgaagctatattttttaatttgaaccttctaataacgagtactagatgaagtatgtgataggtgtttaaaacagaattttactaaacataatagttttttcaaacaaatgtgaatttaatagttaaattgcaggatattgttttgatgaaaatatatattaaattttaaaaaatgaaacacttatatcaatataatttcatatttaatatttattttcaaaatattatacataaaagtaaaattttaataaaatgttgatcagtttttaattttcatgatttttataaacttcatatattgaataaaaatgatgaattcaaaggttttgttagtaaaattttatgtttataaacacaatgattacacaaaataagttcattaatatttactcttgtttgaaaatatatgtaattggaatttaatatatatttattttattgtttgcaggacttgtacactttatgtgtgtaatatactagtcattatttttatgagtaatatttacacattcaattaatcaattagttgtagcatgtctgtttcaaaaaaaaaaaaaatagttgtagcattttttggtatatatgaaacttattcccatagcattcttcctattttattattcatgtagtgagccttcgattaagtgtatgttggatatatttgtgttgatgctacattgattattttttcacggttataatttgttgcttctaatatttcaattatccaccaccacttttgctgttggattagtatataactttaagtatatatgagtgtttttcaaatgttcataacaacaaacatgacgtgttaaagcacgtgtactatactagtgtaggttgatataatacagtttcttttttgtgctatagcacaatattttatctgatgccatagataaatcataatttttgttttgttggtataaggcagacagctaatagaatgcagagtgatgaatacctacttgtgctgtttagtctgttgttgggggaagtatttgtattctaaagtttaaacttcgaaatatgccattgtctcttactttgttaaagtcaaaattgttaatgtgatggtaatgttatagataatttggcccctaacattaatgttttgagagactttggtgtgcctagtgcctccagcttccatctgggttcccatttaagaaaaattcaaaatttgaggaaaatgtcaaattggctaaggagatgcatcttttgtctttgttatccatgtgcttatcaatttgaaaagagagctatgtggggaatccagattagaggcctgcaagaagtgggactgatctcaagaaatctctttttcaatgttcgaagttgttgtttgcaagcatactctgttgcttgctaaagcatgtggaggggaccaataactggagtatatttccatcaaatcaaatttcattgcattgtgttagcatttaattaagcactctggtatataattatgatgttcaagtttaccttactatttagctatgctaccaaattgaaacaataccttatatgttctctctgccttgactaatgaagaatcattgaataagttattgtttcaatttaggtttagacgttttatttctatggactatgtaccttgtgtcagttttatctttattattattagttattaattattaatgggaatgttatctgtattagatctgttgttatatagtaaagaaaaatgtttcattgatactatgctataagacatctggaaagaaaaaaaatataaatattataagatttatgatgtaatagaaaaataaaaataaaaataaatgaatgatctaaaactattttttctctaatactcatccttcatatatcattaagaggaacatataagactatatgctccccaaggaaaaaaccttgtttaattaatgttggttatgtacactaatgatttggatgctagtatcacagactgttgtttataacaccaattttttccactaagtctaagtgcagatttgaaactttcatttttatcacatatatacagaatggtgactttacaatttcaacgtgaaattaacttgattcatgaaaactttgtgtacacataataatagtaataataataataataataataataataataataataataataataataaaaagcgtgacatgagcgggtttttttttacgacatgtagtcttaattaccatgaacatcattattccttggttcacatgataaggcaattgtcatgataaggtaatcgatttatattgtatatagcacataccttgcttgagcacgacgttttgtgacctaggaagcatgaaattaactcttgtcccctcacaaccctcgttttcttccaacaacagatttccccattttccgcaacttccaagagttttctgcactcaaacactcaacacccccttaaccaatgcagcataactctcgttttttagtttcaatcacacatatctcactttcaagttcaacaacggttactgaatagtgatattatctttatacgtaaataaatgcttcaaattttaaattgattttatatttgtgaaaaatgtattataaaggaatagatttgaaattttacttgctaagtcactacaagtaaaataataaaataattttattttttaattaaaataaatattttttaataaaatgttttatgcttttgtttacctaataatcaatgttttttttatttacatatgacatagttgacatataatcatgttccttaggtatatgtttaagaattccatgtttgtgtgtataaaagacatctctcaagcaataaaaaaagatctattgaaacaattcaatttttaataaatctagtatcttaaaagattaattactaactcttgttaatattttaaataaattccaatatcttaaattattagttattaactttatgctggaactggaaatactctgaattcacccaaccaatgctttacttgggcatgttagcatttgttagttcatgataaaatgccatataaacaacgttttataaatgccaaaaaaaatgtgcaaaatgaatttttttaggagaacattaaatacattaaatgaaattgaattaagtagttagccttattaaattgaaagttttcgtctataaataattcttatagtacctgaaaacatatcagtagttgtctgtttattcaattaatcaaagaacctaagctcgcaaaattgagaactgacttcttaatttaagttgatactaaacttgaaaaatctttaaaccgaatctgccatttttaattttaattttaaattgaaaatatctccaaaccatccctattataaataagactaatgttgtacagtgtacacagtatcttcttgttaattatcccaacatttcattaaaaaataaatgtatttaacacctcaaaaatataaaaaaatttaacattttcttcattaaataaataatcagccaattatcgaattttcagaatttcaaaaacatttttattcgttaaaaattactagaagaaaaaataaattatacactaacataaagtaattattcatcatcattttagtgaacttttatttaaaagttatattaataattatttgtaatttttttatctgtaagaataataaagagtagtaaaaaaaattataatataattcatgcattttattttattaagttaattaaattcctgataagtgactaaattttatacaacaccgataaacacaagctagaaacatgaaattggaacccagtacccaacacaataaatgagatagatttaatttaatttaaaaaagatctactccatatttgacacgtaataattgaaaatgattgatgaaagcgattgaatactgagttagctacgagtgggagtggaactatttttctttttcattttttatttattttaaaaaaaaaaaaaggaagaagaattgagaaagtgtataaaagacgcggggtgccaaccatatttcttcctatctgccatcttcctccttagcctcacctcttccaatcccaatcccaatccaatccaaacatgttagggttttcagtgttcaaatttccccttcccatttcttcaatcaacataactcatgcagcatgatcccaccaccttcaccactttcaactccaaatttccttacaaacgcactcaccacccaaccgatcgcattcttcccttcgccaaactcacgcctattcgcccttcctcggtacttcacttccttcctttttgtctcgactgctgctaaagctttaacgattcgtattttttttttttttttttagttcgtgaagagattttactcttgaagtttggtgtaatttttttgtttgttgctgtccctgaacttacgccaatgagttctctgtgtgggagaagtacaaatagttggtgctttgaagatccgcaaggatttcaatcccacttgatcaagtcaagtggttgcgattatatgaacttggttgggtgctggtttggtgtggaaaattagagccctatttgaattgcatttggtgaacttcaattcttaaatgatttaagattttcccccatttttttattattttttactgtcttttgtcagcttcacattaatcttagtagtaacttatttgattttctggagtggtaactggttaggcttgatattaatggataaattttttattactgatatttaggtctaaagcgaattggtatatcatttttctcttaccctctacggattgataatttattccctgtaagtattaataattgaatttagcatatgttggtttggttggtggatctgcggtagtgttgttagttgttattaacattgctggatagcaacatttggaagttggaatcgacctttgggtgaaacttgggtatgtatgtgcacaggatatgaagcatttcttgtcttgttaattgatttcagaggttttggatggagtaaagaggaagagtgttatggcaattcgacttgtatgcgaacaaactttttggtgtctttgttggatgctgaatatttgaattttctgttggatgttcttacctttttagagatgatttggcataagattgctttgaatgagaaatattagcagatctatttaatttaggatgtggactatccttttctgcaaggaggataccctatcctccaaattccttgtatttcttctttccttatatatgaacattctggcttctccataagaaagttttgattaattatctgatgtccttgtctctttggcacacaatagacatatacttaatatgttaagtctctttccctcaattaatgtaacttctttgataattattgttatccttaactcataagtcattgtcatagagaaaccaaataaggattcatctttggcttttagtttttgaatatcttgtcttcaaacttgtatttattcatataacaggagacaagtgtaaaggcagaaaggttgtaaaatcttcaaaggatttctcatttaaggggtggtattgcaatgttagcttctaaagaaatgatgaaattcaaatcctaccagaaccgggctaatttgttcgtgaaggaatatttgttagcagaccctctgattccatatacttctattattggtggtatttttgcttgcaagatggtatgttgtattaaattttatcctcattctattttctaaagtatttcacctgacttaggagcttttaagattactgctatttattatttttattttacaattatctctaaatatttcctgtttttccaggtctatgatcttactcagctttttagcactgttcactttaagagctattccagcctcactagaatccaacgtgttgagtggaataatcggtgaggggatgttttcatttggtggaatgtttcttaatttgtttctgacaagataatatgtttacaatttttttcctattatttgtgcagttctatgtcaacaattcattctattttcataacaactatatcgttgtacttggtgttttgctcaaatctatattctgacaaccagtcgtcagaacttattacatttcgaagctcttcatcatctacctttgctctgggggtaagaatgatgtggaccctttacaatttgtttcccttttcttcctctttgtgatttatctctgcaggtcaccattatgataaacaataatgaataatcacaaataattgtctcacttcactgcggaggacatgtcaataaatctagtcacctaaccaatagaatgaagggatgaatcatggagttcatttttattttaatctatgactctgccaagtggggttagatattattagcatcatcttgatcactgactttttgccatatatattttctgatattgtcgtgaatgccatgatgtagtggagttccaaaaagtacgagataatatacataagattattttggagattttggtgggcttttcatggtttgacatttttatgatggagatattgtaagttgagtctgaatccctagatatactggaagttaaatttggagaacacccatgccttgttatgaaagcaagacagacctagatgaaatcataggctgccagggtaaaagaaaaaaatattttatgaaaattgttgatgagtaagtatatacgataagcaagtaggtaatgttaacttccatgaagtagaggattgtcttttgtagtccatgaatggaatccagcatggagatttaaggtattacgaatgtttcttagaagaagccactactaggaaggttttttgtataatgatcaatgcaaacacccaagacttgatcagtaggatactagtgatgaaatgctatttgccttcagctgcctttaacttgctgcttgattttcataatttgttttttcttctgaaagatttgcttaagaaagaaaagcaagataaatagattcccgtatgttttacattgtccacttttttaactttaaagcgttctgcaattgctcttcagacctgcatacttcctagagtaatgtaatctatttgataattaaagtacataaatgacaattttttattagcgtgaaccatatgttgatccagagtgtgtgattaatgcaattggcattggttggaccctagattgaataagttagactgaaatgttaccaatttatcatcatttctttatgtgtgtgtagccatattgtctgagcatgttaacaaatattattgacatcttatattaactaaatcactcttctcatttttcttagtatctatatcttctgctaatttccttttagtacctcttctatatgttgctagtcatgatttacaacaaatttggacttgttattcccttgattttactgatacatccaatgataacaaaaagtatatatcttacgtttatcgatcatcatattatgagctgcaacacatttttgtttttatctggtcatgaaatttgtattatgttttaatttttaatgtgacaggtgtctgtcggttacttcatcgctgaccttgggatgatattttggttttttccttctcttggtggatatgagtatgtaaggatcatatcttttgacttgcatagtttaaaccaatctaaccttgatcatctgaactctcttaatcaattttaagatattccacttgattatggcaagagtttggtttccttcctttttcaccctatttggttgtaaatatgaatttaacatgacttcatattaacattgattcaggtgattcatcatttgctttctttagtagcagtagcgttttcaatgttgagcggggagggtcagctatacacatacatggtcctgatctctgagacaacaactcctgggatcaacttgagatggtaatcttgcacctaaatgtgcactatatatgtcatgtaatttatttactaatgcacatactgtgtttgtgaaggtatcttgatgcagctggaatgaagaagtcaaaagcttatctcatcaatggggttgtgatattcattgcttggctggtgggttaagtcattgcagtttgaaatatattgtcactcatttatggtgttatttgtggaatcattgtgaattgcatatcatattaagtatatagcaatctcatccgtgccatcttggacatgctaactgaaatggtcttcctgcaggttgccagaatacttttgtttgtttacatgtgttaccatgtctacctgcactttgaccaggtaataactactgactgaatttaagaattgtctggtatgtggtgctttgcagcaagcagatcttaatattgaatttttggccttttaagatggctaataatgttttgttgcccttctattggatgtatttgttgccaacaagatcactttttgaacttgcatgtatgtgtgtttgggtgcatggatcagcaattcccttggtttggttatgttcaaattgtgaagaaatttttaaaattttgtgtgggtcccacaccttttctacactactttaattttaaatatttcttctcaattctccccttcccttccattccacacaaccaaactcttccttagtgtggtagtctctgtccatttacgcatgtatatacttacatagcattacctctacataataagactgaattggtagaacttgttccaataaatttacaatttgactccttgtttgcttagacgaatgttgtcatagtagatctatcatgtcaactagttagtcatgaaatattcatctcagaagattgttaaaaatacacctggatgtgatagggatagggagtggtttattgtgaggtatgagagttgttaataacgactgttgcattttacgtgcatagtcaaggagaatgtgtaatgtcttcattttgtaataaatgttttagactttagtcttgcatgggaatcttaaaaatggtttatttctttctaatttctggtcaagcaaagtctactttataaagcttaggatctcacgtcattgttcaattattcattcaacagattgagcagatgcacgcgtttggacaagtgttagttattgttgtgccgctggcgctatcagttatgaacttgatttggttttcaaaaattatcaaagggttgcggaagacgttggcgaagaggcagtgaaaattctgctcagtgatattattttagaaaaatgatatacgggtcaatgatgtgtagtgaaagatgtaacagaacagaaaccattgaaagtgtttggattccctgtggatccgaacttgtacaaagatgttcattctgcctttttttttttcttcctattaatgtacatttattagtttaattttaaagtatttcgttccatttgtttggcaggagaaattatcatatgattcgggaatttttggtcaatcttcatgtgatatataacaagatcatggacaccacggtatttaatttctggtttgccgaggaaatgaagtattatatgtggtagcaactagcaagtgtaccatgcattgatggataataactatccaaataagtacacttggcctctttctccctcttaaggaaaaaaatttaatcctaatccatcgattttatcaaaaaagattactttttaaaggtgagtgaagtttagcttatagaggactaatggataactataatatctagcataattaggatttaggagcaggaagacgttcgattgtttttctaaggagcaataaaatgttttttttttaaatgaagtttacacctgattttatgaaatgtatcttgataaatgaaatttcatttgaaggaatggctttcggagttaatacgcctgatttaaacaattatttcaattatgaattacatacttttataagttttattttatatctgcatgggtcagttttttttcatgaaaaaattgcttttaatttgaaaagaaattacttatataaaattttaatatgtttgtcaaagtttttcttttcaaaaaattataatcaataaaatatattttataattatttttttaaaatgttacatcaagattttaaaaataaactactttatacagaattttaaaattactatttattttttaagtttcaatatacgggccttagtggtttagatagctagcattataacgttgtgacttacatagtttatttttatattataaataaaaatacacaattaaaaaagtgtatttcacttattatctctataattactcaaaaatttctctccattatcttaaacttcctttcttttatttttatttgcatacttaatttcttaactatttatcattttcaatctattttcttttattttcattcctaaattaattttttagaaattgtcaataatgtaatataatttatatttaaatttaaatttaaataatttattataaatttaaaatataatttatatattaaaaaatatttatttagtattaattttgattattatcttgtaccattcacacgctgaaattactagttaaatgtgatgggttgaatcatgttataaatgtatggttgaacaatttaacattgattaaatggagacaagttcaaacagtatgcaatccaaaggatcgttataccctttttttttcctgcacgtgtccaacatatatacaagctagaatatttttgaaatgttagacataaaaataatcactttgcctttcaactggtttcattggtatgggaggtatcatcaaagatcactattaaccgagtttttggttgctatggctctacaaagatataagatcaacattggggatatcagatttgggttgaaaagaggctacaaagaccatatgtagcctttttttttttttggaaaaactttatacactcaacaaaaactaatacatcattccaatacaatgcatttttaaaaatatctttgttttattacatgcttcaaacatatgattaacgtgacactccaaccaactgacataataggtcaattatgctaaaaatcaattaatgttgatacatataatattaaaacttttaatgtatatttaatacacgtataagtttacataataaattttgtaataattaattttgatataataattaaagtatttttttatatataaaaatcataagtttaataaaaaaattgtatgtctaataaaaattatatttgtatttataggctaaattaaaaattatatatgtatttacaatgtaaattgtagagaccatatgctcaagtccaatatgactatacatatatagataataacatttatcgtttaagtataatcacaaaccagataaagtactggagagtgtggagacgactggacttcgtccagcttgctaactaattaactttcttttccatggaagatgtacttatcacaaatttataatctgttcaaaatgattttaagcttttacaatttctgatattttataaaatgagaataacattatcatgtgtatgtgggttattatagctagatcgatcgatggaagtttatcttgattctattttaggaaattattgaacaagagaatacaacgttccactttatcaactaatattctaaccccatagcacaacaaaaagaaaatcctttgcttgtggaattggttgttctatagctagccaataataagcacggagttatgattgatggtgattatactcatcacatgaccttccatgaaggcatataattgatttagagatctggataattagttaaaagaaattataattaaaattgcagacggaggctttattgataaggtaaaaaggtaaaggagttgctacaattgatacttggtcaaagtatcattaatttcaaatgtgttgtctaggattgaaattcaccacaatctgcgtgtgataactcctagaaaagaattatgctgttttctttaagaataagacatgtgtgaaaggttattcatatgatcatgatggtgctgagttgtttacagtaaagatgcatataatgtgattgaatctgaaaagatgcataattaatatgatattttcattaaactatatgcaagtgatcaatcataagtagaaagttgctccaactcaacttgatcgatcatcaccgttagattttaatttccattaattaataagcatggtttaaattcttgtatcattattgttacggaaaaagaaagagaaccttttattacgcctaacaagcctaacactgtaataaagtacactaattaactaactattaattgtaagtccttgcctaaaaagttaacatgtaattaaaactagtgttacgcacgtgtaagtaaataaaaagaattaatacgcatattcagattgttaggtctaagtttatgtaattgtttgcaaaagacggcgtagaaatagaatcaacggaatgattagcagctgcagttgatgacgaaaaacgcattatctctttgctattctcactttgcataatggacattagaggcgtgctgaaggagaaagatagatcagcaaaattttcttcttcatttgacacatcatcactaagcaagagtccacttgactctgattcctgcaaggttccagaatatatatattttgaacaaaaaatatatctgtgaataacatgtaatgaacatttatattcttctctcttcttcttttttttctttataataaaaatgttaaatttaatacgctgtattcaaattcgtttatttaatcaagaataaagaatgtaattattagttagatcatgcaatatttgtatacaaagcgtattttccgctttgatatgttaaatttaaaacgctatattcaatatttactttcttatgtctcaaataaacatataaaaaagcattttgttgcaaaaaaaacatataaattaaagttagtctttattttctacgttaattgggactaaaattttatgtgccaagcaaaaaccattccacctgccccatctaacaattaatttgaagtaagctaagttcttaatttgaaattttgtaagtgcaacgcatggaatataaactacatggacattttcttctttccgagagttcgtatgctaaaaaaatgtgtaatttaattataaaaccattaataatagaagtctaattaataaaaaaattgacttgtgacgaagtgtttatgtgtgcgggaatgtttaatattcaacttttaataccgacaaaaaaaaaagtttaaagtatgtgtatatttttgcagagatatttcagcgactagaagcatcaattcaattactaaattgtcatcaagacaagaacataggttttaatttgaaacattgcgtttcatgcttttacaacataagatgatcaatgaaaagtcgcaaaacaaattggggagacgccaagtgatatcaatattagtttaaaatagtacctggtttagatcataatcagtttcttcccgcttcagaatcctgtttacataatttcatagtcataaagcagttcttatatatatatatatatatatatatatatatatatatatatatatatatatatattaaaaaaatattaaaagttgttcccagcttcctatcgatttgatgagcatattaaaagagtatgcaaaaggtaaataaaaatgtgataaaataactgattcataaagtgataatagtaaaatgtagtacttcatgatgtaacatattcaaatgacatttttttataatggctgaagttataaaaaaatagtatatataacctaattcattttcaaaagctaattccatcaatcaatggagcattatttgcttaagttttatgagaagtatattaaccacttttttaattattgtgagatatctaactatacttctctcatgcctaaaacagttattataacttaaccggtatatatataacaaaagaaaaaggaattaataaaatttgagtagtgtcagaccatatacataatcattaatgaagcttgttgaaatagatagtgatccaaccatgagacttgaataccatattagacaaaaaaattgaaaagtagttcagaataagaaaatattgtccaaatcctaaaaaaaatattttgattatattcataattaatcaaacacaactgtaactataaagttatgtcttgataacttgttgattatgaattcgaatctagaaacaatctttttttaagataatgggatacatattttttttagttcttttatccatagctaatcaaagacatcttaacccaatatcctttgaaaaatcagtaatgggttacctttcggttggagaaatagagcatattttgaaatcgtttgcctttcctaccagcaactgatccactggtgcaataatggcatgtcctttcctgtttctgtacatctaataaaacgcaaaatttctctttggatggatgtaggaaaactcaatcatgaattatatatactaattcaaaaattaattaatagaagaaaggaaataaataatgtgtgtatatatatatacacacgcacgtaaataacattataattccccagcagtggtcttgtgtttgatctcagtatttgggtataaaaaaatattcttaaaacaaatttctgctttaatttctgactttactctggatctacttaatttcttacttctaaaataattaacaggatactgtataaaaaccacaaaatatgagtagccagcctaatggctctgagcttatctaggttgcttcttgatgatgatgatgatgatgatgatgatgatgatgatgatgatgatgatgatgatgatgatgatgatgatgatgatgattaaaaccaagtatgatttgaatattggaacacacattgtgcatgcgtttttgcattgttgtcaagatgagagagagaattgaattaatttgacagctgtatagagctgcatatttggctgctttgatattgttactcaatgaaacaaaaatcttctttttctttaaatcttccctcttcgtggagcatgtgtacctaaatattcttggttaattaaacaagatcacaaattattataatttttttactgtttttaatttttatgaataaaaaaatatgtaactaacctagatagttaattgtatatagatgtttgtattgttatatactactatatagttcactgtgcagtgacttattatcatgttctccatcaattatgatctttttgaaagaaggctctatctgctttgttgttttgcttttaagcaataattactaattaccaatgtattagctaggtctttgttatttattttcccatttaatatagatggaagagagatgtgaccttaggactaaaaacggagaattaataaatctatacggactttctatgacaatactatcctattatcatatcagaaatatttttaagacttaaatattttttaatctttataatttagtattttttagttttagttttataaaattattttttaatttttaatttttaagattatgtttgttttattttttatcttcatgacattttagataatacttttttattcttcaaaatgttatatatctaaagagttttaaggactaaaataaaatgaatataatttataaggattaaaagtacaaaaataattttacaataaaaaaaaattactacattgaaaagaaaagaaaatgtatttaaatcatattttaattacataataatctctgcacgttttagaactattttactagtactgttaagtgatgaaagaaattggtgctaaattagctactatacgtatattaattaaatcttcctcctcagatgatcatgctgagtttccattcacaaaaaataataataagatttggaccacacgagtaagatatatatatatatatatatatatatatatatatatatatatatatatatatatatatatatatatatatatgcttacatgcatacctgaagatggcttttgatgtgagcgattctcaatcctttcacacgcatctgctgcaaaattcgctttggagttgcctctgcaaaaccattttgctggatttatacatttgcagcttaattaagcatcccaattcacaaacagttcctttccttcccaccttaatttgatttgatatttcaaacacacacacaaggctagagaagagaagagaggaaacgaacgtatgcttcatctatggatatatattatgaaccaataattttctgctatatacatgtcatagatatgtgctattataaattatattgcaaacacgttaatttttctcttctcagatattgtggtatgcaataagaattagaagataaacaagcaaactcaaagaaatctagaaatgaaactcagacatgcaaaaaattgtcagtcaacaaagcattaaagttaaggagtcaaggacaattctaaggttggatcagaagaaatcaaaatgaaagaatttgatcgaaatcatcaacattactggcttccttcgatcaaacggacttttgtatccaataacatatgctttcattaactgattttgggatatgcttaatatactatacatataatttgctataaaccctagctagaattataaatatcttatatatttgtttacatgaaggaaattaaacttactttgttttccacctaaactttcaatagcttcaacaaagtgttgatgaagttcaggtgtccaccgcaggcgtggaagttcagatttgttgtattttcttacactgcttttaatcatttttctgtgcttcacactgttacatatgtgatatgtaattatgtatagctatagtgaacctcaacgcgaataataagactggtctcacctatatacaacatttcaatatgaatgctgcagcaacctccaaaagtccaaggccaatgacttttcaagaaattgaattaaataatggattcttaaaagctgaagcgtatattgcacataaattctttttgtctatttttcaaagaaaaaaaatcgcttttgttctccaatcgatcattccatttaaaattgacagtatacaaaagatggaatgtgttttaaaaagatgatatttgttagattcgtccaatgacgcgtttcacacagttcctatttaatagaagaaaagtactaactaaatattttcaaagcattgattaaaaagttaaaaataattttttataaaaaatatgaatttaaatataatatactaacaatctaattaggaattatcatataaataaaaattattaattttataataattaatttaaaatttataaaaaatgtacattaataacaatctgttaaaattaaactaaaaaggtctcaactacatatcctagtggtcatttttaatgtaattctatcataattttaataaaaattatttatttataaattttagtatctttaaatatttgttaatattttttggtaggttcatttctttttttggtgggtacaaactcgttaatacgtttcttttcatagcattattgatccgaaaatattggcattcaccgacagcaattgttcctttcacatttctttattgtagttttcaaaacatgagttgaaaaacaaaaatcaattatgtaaaataagaaagttaagcatatgtagatcttattatctgaattaagacaatgttaattatgataaaatgagatttaaaaataacccgtccctatattataaatctaattcagtactgtatttatttttcaacataaattaattataggatattcatattaattttcttttatgctaagatttctttttcaaatttaaaccttaataagtttctttttaacttttatatagtatcgactcatctatttacattcttttaattttaagttttgaaaaaacttaaaatatattttaattaatacgatattattttattaaaaatttataaaatgttattctacttaatgttgtttaaaaaagttaagtaccaattataaaatgataaaagtaacttttatttgattgaatagttaattaaagcaaaaaaaaacattgatttgatttaatatagatcaattttttaaaacacgtgccacataatattaaaaaaaacacatcattatttaaatttaattaatagaaattcgaaaaaatgctttattttcgtagacacaaattcatgttataagagattatttttatcctcctttgtttgattttattaaaaaacaatgaaaaggcgagaagagtaatattatttgagcatctaaaaattgagatatatatgtcatatataccacatacattaatcataattatttttctcccacgtacctttttatgttttttgcatccacttataatacacaaaaacacatctcaaatgaaaaggtacatcattttattccccaaatggaaatatgtgatgctgcttggcgtgggaattgcgtaccttgctttccttaacttgtctctccatcaaaataatcaaaaggggggaataacctattgtatcatcacaaattcttcaatatattactaaactgccaaacttgcatggatgaatttcctcttcctttcattttctttctacttttataacaaacataccaaaaaaaagtatgcacaagaaaagaaaaacaatcacaatattaattcatgcattaaatgttaatttatagtgttaaaacaaacacaaaggctatggctgttgttcacggcttacgttgtcccaatgttaggtggtctatatgattggccaagtcgtgtcaatgtcatgtttcatgatcgaccgacataacattttaattaagatatttaataatgcaatatgttcgtaaaaatagagtttaatttatacttaatagtgtttgattaccatccgcccaaaacaaaaacaaaaaacatgtacactaattatgtattatgctacacattgtcaataaaattttaaatgattttgccaaaaaagaagttataaataacttatagttgttaatagagggaggaaaaatgtcttccaattaaatcttcaattctctgtggccaaccaatttcatgtcaataatagatcgacggtgcctacttttggacccatctctgtcttcgttatgccgtgcttatcaacactactctttcctcaaaattcaaacatcatgaaaagagaatctagaactgcaattaagaatttccttaaaaggtttacgatatatgggaccacacgttcctctgaatctccgtccatggcataatatggaccgtcatagatcaccatcacgtggttttatattcccatgatgctttgaacataacagcccttttgattaaactcaggtggtcccagttcaacaatcccatgcacgtcaaatcttagaaatagtgcatgcaacaatacgctttcttcattcacaccacttatgttcctcaggttcgctcgatttcaaagaaagagaatgaagaagtgaaataaataataaaatatgatcaaacctatatttttaggttatactttaattcaaaaaaattattttaattaattttttttctactttacggaacagactcttaatgttctagctaggaatatatatcatggtttttataagttcatatccaaacgaaaatcagctaaataatcaacacgaatggaccaatagaataatgatgtcgctcctttcgttttcggttgagaaagtaacaaagatagtctatgaattttgttaaacgacaatgttgataattgatatgtaattatgtactaccacggactttcattgctgttcagtcaaatggaatgttaattcttaaatctgatagccattatttgattttgtgtttcttatggctccatttccgcgaattcatgatatcgatcggtccctagctaccatgagctaccatttttcaacttcctcattaaactacttcagttccatgaatatttcatttaatttgtactgtcgtgaataaattgcagaaccattaatattacaattaattgctagctagtaaaaatttgaaaatcatgttatgaaggtttggacataaaataaaagttgtaaatcatgctatattttcaagttcacactcctgaaaataattttgcaaaacttaaaataaatatataaaaacttttcttatcttttcaattttacatcaactaattaatcacaattttacaagaaaaattatgccgagtatactgacatcggtgagacagcatttctttaaatatttttttaaaccaaactatgcaatactatattctttcgagtttctaattaaatctatagtcatctacatgaggtttctacagtttcaatttcagggatatacacattaagttttgcaaaggaattatcctcatctaaaattttgttttcttatccaaaagattaagagccgtatccaacttctcattaattggaatttaatataatcaattaatatgcttaaattggttattaagtaatcttcttatttattgaaaggacttcggggtagaaattttattttcctatttatgagaaatttgttatcttaacttctaatttatcaaggaaaataaccattcaaaattcgatcaaaatgtaaaaaaatataattaataattatttttgttaaaaatcaaagtcaagtactattcaaataattcaaccttaattttaacacattaatcatttatgtcaaattatttcataaaaatttatttatgagaaatttacttctttagaatgaatatatatatatatatatatatatatatatcaacacaattatccctttgatgtacatatttcttatttataaattatcctttaatatatttaactgtttttattttttcataaatgtaactgctacaatttctcctaaaaaaaccattactactactttttttaactacttttttttgttttttcttttttttaaataaagatagaggcacagtgcttcttattcaactaataaacaataaaagaaaaacaacttaaaaagtgacgatttacaaaaaaaaaattgaaggaatttacaatattttataaagtagtactttaatcagtgtattatacatgatatataattttgatataattaaaaattatataatgaagagataattttaatatataaaaattaataaataaatatctttaaatatataaattatattttcatttataatataccatttaaattttcatataagattatttataactatggacaatttttaaaatattaatatatttaatttagagaatagagatgatgataaaagagaataaattgaaagtaaaggactactaagaaggtcatgtatagagtagtttaatatggggtagagaataatttttaactaatcatcagagtaatatgaaatgtatgtccaaataaaagaaaaatgaaattattaaaaatatttaattaaaagaatgaaaatgttactctttaaattaaagatttagtttataatgtaggcatagattttagatgaatatttatggcaagattgagtacatccagcggaggatttgtttagtgaaaacaaaaaaatagttaataattaatttttcaaaaaatattataattttttacaaaatacataatctcgtgacaaaagaatttaaaatgcctctcaagaactattttctacacttaacaatgtattatttttattttttttttgttataactttttaccttcattttaaaaacaattgtcttatgtttctttatgggagcaaattattttttaattaaagatgtttaagtaaaataaaagttgttttggggggaaattgtccccgtacaaccctaagtgcatctatttatcactaaatatatcaagaaaatataatttaattgatacataatatatgaattattataaatataatacataatttttattcttacgtataggaaaaatattgtaaaattgaataaataatcacaggataaagtcatttcatacctattgccatcttctctgacatatagcgtgtgaatgttagaatggaaaatgggtaacatgtggtctgagatctaacataaatgggtcatcataaacaattaatgttttgactataatacatgtacttcggcattgcatagatttctagcatcgctttcaatccagcaatgttaattaacttttaattcaaggcccttagtttagggaacgtaaagagggataactccacaagctatggttccatatatattagagtagtttaccaaaacaatataaagtagtcgcgcatgtgtagtgatcctaaatgatattattaaaattgcactcttcactcttatcaagtatttttcacaccaactgatatggtattcaggaatgattaggtagagtattaggtccttatgaatagtttcaaactatccgcgtcttctatttttgtttggggtaagaaggtttcattttatgtaaattaagcttcttgttgactcgtgttttgatattcatggcaataaactatttttgtttatatcgatttaaaaccctaaacaagacaataacatcttgcaccgatatcaagcacgtcgttgatttgtgttctggaactttcttcagcttcaagaacactgcatgccaatgggggagttggtgttggtttgatcattcatctttgtttgttttatgttgcttgtttgtcttatgttcttttaaatacgaatgtgtatgcatctgttttttttttttcaattaattggttttacttttactaatacttgaccaataattaaaaaataaaatttacttttttttaataactaggcaggtatcatgtaaaaaaagtttttatgttatcaatccaacaaaaattatttttaatttaatttataaatatttatgattaaatggttgtgtaaattaaaaaactatactattaaataatacaatttatcattcattatataaaaaaaattaacagttaatattaataattaaatattccaaatttcaacttatataatttgttgtattgttagaattactgcattgaaatattgctttatactttatgaaccttgcggtgttgtctttaaaaagtgtttcaatgagttaagaaataaaatttatactttaatggtttcttttttcctgaaaatttatatggtaattgcctaaatagttaggtttcagcatctgggcatttataaaatgacaatgtaatggtgctggtatgatatctcagcttcctgtctctctgatgttctttttattctattttggtctgttccattatagacatcttaactcatcactttctccagttttgttttaactgaaataattcttaccactattctgtcttaaaattctcagttcagtgcattccacatataacagatcatttttttaaataataattctggtaataattagcagtgtactgatatcactttctgtgttgttgctgatataaccttgtttgatttataatcttggtgcagagtgctcataggaaaagattggatatcctcaacacagtggggatatcaaactctgttttgaggctaattgaaagacgtaacagctgtgatcaaatatccagggatgctattgaccatcattttcatatttgcttattttttgtggagacattaacacgatacgttgttcaaaaactgacatttccaaagttccaatgtggaaagtatataaatttagattttaggtttgtcaagctgactagcagggcaatttttccataataaaaatcttgacttgttacatgaagaaagatgctcatcaatctcatgtttatcgctgacgctctaaatattatatcatgatcaactcaaagcctgtaacagagatttcattcctcttttgattttataatataaaagatttcattaactattctacattctactcttcatattaaaacgttcacactagaatttacaaagattttactatgtggttgtacaagcgagggaactaatgtccagaatccatcatctcatctcactgcgcacacacctgaaagttgtggcacaaacgcatctgccgaccaagaaaaagacggcattgtttgcacaaggaacaaaaaggcaatcttctgactgaatttttcactgtcaggatttgttctctatataagctgaacgcaagtttcactttcactgttaggatttgtattctatataagcttctttcaaaactgaacatacaatcatcaaccttccgtttcgaccattatcgtgagaaagcaggatcaggtttggggttgatcccacttgttgaacttcctatgctttaaaataaggcccagaggtctggcgcccatcgtgatttaaaagctctgcaagggatccttttggtctcttaccaaaacgcctagtacctgttgctggcttgcctaaagttgttgcattgaccatactggttagtgtgtccacaccttctaacattgctggcacaccaatgcacccatcacaagacagaatacaagctatagcatgcacagatgccgccatgatgggaggaagtgtattccttggatgtgttacctaaaaatgtaaaccaatgtgtcataacaggaatgacatggataaatcacaaaagtgaaaagtacaagaaaaactaaacaagtaaaatttggttatttactttgtataaaatcgctgctgataatctctctctcaagcagtatatctgagcaacatcaattgctgttgaacgaaaataaagccaacggtccatgattactttaaccatactatcaggagaagacatcaacttatcctcacgacctccactggactcagcatcaaactccatcccatcttcacttccagcttcatcttcactacctcctgcatcatcctcatccccctcattattttcttctgctagggcaacagcaatctctgttgaaagcagcaaaagtggaagtggtccaacaactgtgcagttccttaggttcatacccccatcaccgcgagtaatctcatcatacacaattaaagtgttatctaaatttttcttgaatgacaacttaaaatttatggaatgattgtgcaggcgaactttatctccacttgttgtttcaacaataaccctatttccacttttatttgtaagaaatctcccaacccttggatacaaacctgctaccaaaactgcatggagcacaccagggtcatgtgtattcacactgtaacctgaaacgtcttcatgaataaacccaagtcgaattagttctgcttggagttgcctgcgcatgcctgataacatattcatggtgcttgaagacacaaaatactgagaacaaaaccgtgcttctagacccatattctttgcattattccagcattcaaatgcagccaatacggcaaactgatcactacaacccccatataaagaagcaagctcatatttggcagctgaagctctcttcttttcttcaggtaacattggaagtgtaaatggatctctataatcagatgcgcaggcaagagttaaagctggatcaaggcagttcatcaatatagcaaaaaaaagcatcctgcatattaatgggtgaacaggaagtgaaccaagcttctcccctagttgggtgagtttttcatcatttgaaaatgccccaatatcttgaagaactataattgcattgcgtatggactcaaaatctggaggatctaatgtcttgcgtagaaattcttctactttgcaacttggatcatgcaactttacctgtcacaagagagagagtaagaaccaaatctaacatgaggggaaaattattgtcttgtttcattatcatatagaatcagtccattgaaaccctgcttgtaatcccccacaaggacctttgctcttcccaaaacctgacaagaaagttgtttcctttgcacaaaccaataaccaaccacattacacagcatcgcacaaattagatcatgaaaaattataagtttgaatatagcattgcaaagttactaacttctgccattttctaacttttaatattgacactctaatgggataccagagaacctttttactattttaacactgagtatataaaaagcaccaagagtctgagtcaccaatcagggaagatcgaatacctgcagacaaagctcctcaataggcattctcctaatttccggaatctgaaaatctggcaaggaagctgctcgagttcttgaatatagatgatagcatattccaggttgacaacggccagcacgtccctctcgctgcttagcacttgcttttgaaatccaagatgactgaagagttgacacattgttataagcatcgtaacttttttccttcattcgtccggtgtctatgacatacactatatcatcaatggtgatggctgtttcagcaatattggttgatagtacaattttgcgacaaccatgaggtgggcgcctaaaaaccttcttttgttccatgcttggaaccattgaatgcagagatatgagcataaacattgaggaattcttgaaaaaagatgatgcaagcaatctctcacgtgttctatttatatcatcccagcctggaagaaaaacaaggatccctccatctgttgaatcaatacatatttttcttatcagctgctctatcaaaacatcatcaacaagttcagggttgactgttgccaggtatttatcaagtaacttcttctcttccatggagttggaaaaatcattatacatgtgcttcttcaatatttcggctgcttctggttggttttccctttcagtgatctccaatgcagtcattccatctttgtcccttaaacagcaatctgccccacaagataagagcatgcacatatcacccactctaccttttccagcaaacaccattaacggagtaagaccagttaaagaatgttggtaattaaatagttctggggttccttccgaagaaaccaattctaacagcaggtcccactgatcattagaccaagccaaactaatagcttcatcaatggaaagcttctcttcttctcttagctcacaagtgttttttggaatactaaatgtggtactatcaagatgattatcatgcctggattttacaatagaaagaacatcctccaaatagaaagttttgacctgaagaaaggttggatagacaattgtagtaagtaacatgtgacaaagtattggttaatttacaatctacgactatataggtaccggataagtgaagcccggaacacagatgattggacagcccccaaagtattgagaaaatctagcagcatcaatggtagcactcattaatatctgtaatattagagcaccagaaggttaaaaatgggaaataacataattataaattaaataagcacttaacaggagacagagaaatagagacaaaaagatataagtaataagtttgaactgaccagacgtaggtgaggatataaagggagcatgtctctgcatataaattaccaaaaattagagatattagtccaaaaaccagacaaacctcttatgccagtaatcttatgtataatctttcttctttgggagggaggattaaatataacaggaagttattgccacatacttgtggttaaaaaaaaggcatttgcactcatcaaggaacgactcaactctacccaaaaagctaataggtgcaaaatatctcgaacaagcttaacctacagcacaatgttctcctcacttatgcaacaagcacttatacatttgtatttaactataccacactatagagtaaaggccaataggttcctttcaatggtatacctgatgattgccaacatgaagtctgagtatcgatccctttcatgaatttcatcctgaacaaaaaatgaatgtcaccttagtttgcaatgcatagtttccgaggaaaggatgcacaggatatgcttcgtaatgccaaggcatactttccaaggaaagtatatgcaggaaatgcctcatatgccaagattcatgaagaggggatatatgaagacatttgaattcacttgtcacttaacacaacaaagtgtctaagataataatctatatgaaagtttcaaagtatacttcccctcaaagtattacaaatacctattgcaggagagacccgtctgaaaaccaattattattttctgttttcacagattcctatacaaacttttgaaaataggaaacaaagtaaaacaagtgccaattttgtaattaaaagtaaaaaacaaaaaatattttctgaaaccaaacagctcctaattttacaacaatttcaaaaaataatgtctcggattctaacagattttcctagtcaatttgaattttcaattaaccactttatctgagaacttaccagtcatacctaatataaccaattttttaaccatccaaataacacaaaaaaataaggtatagaagcagtatttaccaaatattaagtaccatagtttatgctctagctaaagataaaaaaataatttacaagtaccataattatgtgagtgatgccagaaatatcatccttcacacgccctatctttgacgaatgataacctttggaaacaagcgcccttaataccactccagtggtacatagcacaattgacgattgccttccacctctgctttctaaccgtatctggattttttgtttaaaatgtaagccacagaatcatatgttcatgagatgtaaaccactaggaaaactagcaatatgctactataagaagcaaggaaaccagtgcttaggaagggacttgcataatcaacataggatattgaatgttgaagggcaaaaagtcataattctatgtaagaaagaaagtgatatgggaaaatagaaaagatatttgtagattgaagcaatattactaatgatatattatagatttcctcctcggtatcaataaaaacatggtgtgttatgagagtgtaacacacgaatgcaaaaaactagtctgattatgataacaatgctcaatgttcaaataaatatttctatacaaaataaattcaaataaaggatcagagtaccattactacaccaaagatacataaacaaaattaccttatatcccacattttctccaatagtctctcctctctcactagcgattctctcggaaactaaacataaaaacggaagaaggaaacaaattgacattaaaactaaaaaaggaacattgaaagaaacacatttcaattaagactaaaaaaggaacattgaaattcaagtccgaaagagttacacacctgaagttgcagagatccgccgaggctgagtgcaaagtattttacatacctctcccttaccccacatatgatccaaaataaattgtgggacctgaatcatgtttaatataaagttaaacaggacaattaaaaaaaagagaaagataaatgttttgcagcatagaaagattactaaaagaccttggtccatatacaatgatgaaaatacagatgggtgaaacccaaaatcacaaagcatcaaaaaattatcagtgtccacaatcatcaaagcttgagtcaattattttatattaagggtaaaaagagcaagtgcattaatacaaaaattaaatacgggtgcagagtcatatcacaagcatacatactaaatggaccaattataaaaatatcaacatacaacctaataatgatcatcttgaaacagtcacaaacaaattatatgtaaatgtagctgcaccataataaagacaaaacaaagaattcgtaacctgcgtagtctttccacaaccagtctcaccagatatgagaacaacctgctttgaaacacgtgaaagaaatattaagaccaaaacacatgcaaaaatttaatctgcaaattcaatttaattgtcatgttgaaatgcactaaaactaaaatcttactcaaccatgttatttgatatatttagcatatcaatgtgaatcatataagctaaattatagtgcatgtgcaaccatcagcacccaagctaccaagtagatgcatatccaaagtcaattttaaattaacctggtgagattcaacagttgatgtaattgaatccttgaaagacgcaattggaagcttagatctcccttcaatgatctgcgagaatggaaatcagacaaataattcaataacaagactattcttttgcaaattctatatatatggcagaagaggaataataagaaaacatcattctgatatatagcaggattaacaaattgctttcattctttgcacagacaaatgatttgccatacacacagcaaacaagcactacatgtcgctatacatgattgataactatggatcttcatgagaaacatttatagagaatgaatgaaattctatagtatttgaagaatagttcaagagtggcctattaatcatacaagtgggaaagttgtccatggaggtgtgcacaaatgcagattacgtaggatccactattgataaaaaaaggtccacctcatggtattgcatgttcttgaatggtagtttggtcacatggagaagcaaaaaaagaaaaatatagttgcaaggttgagtgcaggggcaaaattctgatccatggacaaagggtttgtgagttatcatggttgaaattgtacttgatgaactccaaataaaatatgtaactccaacattttgtgacaataaatcagccattaggatgggacacaacctaatttgttcgtctatatatatatactagccattgcaccattttattgctagtgaaataatattcagttcccttattttgaagcaaacactaagcaacaaaattcatatatgtaggttcaccaacaaaactcatacatgtctggagttgaaaggagagagaaagaaggaggacctgtttcaagttagagacattgttcattctagaagcaagagcttccaatctcctagcaatttcagctttggacatagagggccggctgaaaatatcatccggcctctgttttgttccctcagtagtagtgtcgtcactattttctccgatcatctcccacgagtttccatcaccgggtggataatgagcaaacaaatcacccaacacccactttgcctctccagaaaatgtgaaaggaggaagacttccaaacccgttatccgtgtcaaccttctttttcattttttcaacacacactctcctttccttccctggcctacacaaaacacaggtccaatatgaacaataacacaaatctaaagcattcattccatctccaactattccatttaagaattttgacaataataattcttacagatttaactaaaagtggcaaatttacatgcgctgcccttaacactcacccataacttctagatctaaaccccattctgagggccatttgatgcacccaagcacgctcttggttggacaaaccaggatcaaacttgtacactgcagcaaataaataaataaataatcaaaacccagatttcatgaatggatatagttatgcaaaaatcataatacgtccgacgagaaagttgtgttttttgtgcatgaaatggtgaagaaaaaagggggggaaaaataccttcatcattggaagctcggaagtgttctagaatctgggaaatgcgaatcctggtgacttcatcaactttggggttttgacggaaaagtggttctcctttcttcttccctatgttgttcgtcttcgtcgtcgtttccattgaacaaatccccagtgggtaacttgatgcaacaagcgcagctgcagctactgctattctacttttgtctttgctctgttaaatgttaaatttttaaaccttatacacttatattattataaggctttgcatttcaaccaggttcgggtgaatgaaataagattatcgaaaataaattatctccttagattaatattaatatttaatttagcaatcaacaaattattaatttaagtaatattagattctgatttttttaataagttctcgattcgaattttaattagaatggaagaactccatcaagttaatttctttgatgaaaattaataattggcaaaattctcgatattacttgacaatatgattataaaaaaatcaccagggatcaatatttaactttggaagaaaaacactaaaaaccttccgtcatccaaacaaaaagttatgccctagctagtacttgtgctttccttccgtcatcgtgtatatcgtatctttctccgctgttccattttatctgtttttgttttccatattaggtaaatgcctttttttttctttttgaaagctaggtaaatgccttcttgtttatatgtatttataaataaaaaatgtgtatttgttcttttagcaactattttaattttttttattggaataaacgagttaagtgtttgaaagacactgctcatttactaaatatctgatattaaaataaaataattagttgttaactttcatacatgtcaagtggttatttttcatttttaaatttttctcttttcgccttaattttaattttttagtattagtacttttatattttcacttaaagtaagaaaaaaaaatcctatagtatcttagatgtttgttatttttaatttaaatacacggattcttattagcatctgttttgcttctgcttttccttagtgtaattttctttttgttgtttcttttccttcgtttaccaaaaaaaattgttatgacatgttcatggaaagctataaccatccctagttcattcaaatgcacaaaaatctttcaaactttctctgatgaggggttaatgttttttttttattaatcctttgttcactaagaaaagaaaagaaaaagaaatattgactaattcaaaatttgatccaacgataactaaaatttgatcaatagttattttcatcaagaattgaacttaaatattacttaaataattcaatcttaactttagtatatcaatcatttatgtttaatcacttgattaggagtccaataattttaatcctttcgtgtttacatgtatccttacatttaattctctaacttttctaaaatagactcttatgtaaagtgtaaacataagaggatatctatctatttttaaattaaaacaaataattaattaatattttaagaacgctagataaaaaattaagactataatttttttattggacaacataaaattgcgctcttcataattttgttgtgttttcctatcatttttacattaaaaacttttttattccttaattattagaacactggttaacaaaacttttaaattaattatatttataatttattttattttaaatcaataatagacgtgtgttttttcatgtcgcatttttttttaatgagagtcaatcgtatttgaataataaattattttactttttcacttcacatgctcatatttgaataataaaattgcttttactttttcccttcatatgctcattttaaactagttaaatatattttcgagcacgaccctaatagttacattagataaaaacatttactcttaactttttactttttgtctaatagaacaccgcaaatctaaaacttatgtcaagtttcaagtaattgaaattaatttgggtggatttgtttaagaaaataaaaatctttcaacatttctttttcatttataatgaatcaaacttaatcattataataatttgtattttcaattattacgagaaatgagagtatgagaataaaatcctaactctaatattaacaatggccaatttgaggctaggtatttactatacaaccccaaacgcaaatttgaatctcgggaaacagagaacccaaactcaatcataaggagttctttctgtcaaaaacaattgagttgaatttatccaccatccaatgtctagaaatcctcaccaaggtattctagcaaaccctcgtatggcagtgatacttgttaaaacaagacagtctcccatcgcagtttgacattaatggaacacggatttattatgagatatatatgaaaagtcacatgcatgtttgacatgaatggtccacttgtgataatagtaatcgtatttacacaattgcaatgataagaaaaaagagaaatcaattggaatgagtttgtcatactaagttcccccattgcagtaatggatgccattgctgtgaacattttggtacttgttgtgcagacaattcaggccccataccctaattgttcggtcatcactggctgaggctaacatgtggggattttctggattccagctcacacaattaacagatcctgaatgaccagccaatgcttctattagctcccctgagcttctgtgccatatgtaaacctacaaagataccgaatgcaagtttaataactctccaaaattatccaatagaatccactatcacaagaagtttggttaataatgccaataacatttcaggggtcctacatgctgtattgtttcatatccaaaagaaagaagcttagcggctgctaaatttctatcaatctaagatatatcttgtatctatattcctcatggaaaatctactaaacaccacaactagaaactagtaaatgtggattttcttttgtgttataatgacaaactgatggccaagaagaatacaaaagggaaccccaacagatttaaatacagagcatatcaagcagaattccaacattatcaatcaagatgctcctagttttatcaagataaattagaataaataatacagaagccaagataaattagaataaataatacagaagccattataatagttgtagttgaattcattcaactaatatttataaagatatccagtttatcaatcagagcacaaagcaccatttcatgtgtcttttatgccaatattttaatgaccctcgatagatagcctgcatcaagtgcatgttgaacttattttgaagaaaaagtaacttatttttacaaattattgagacagcttttaaaaaataaaaacatttaacagagagatacaaacatcaaggctttcaatttgcaaattataaaaattacacttgatgaatattttcccattttgttcaatgatgattgaagactcatacctgtgaatcctcacttccactagcaatgaaagcttgcttcaggccaccaaagcaagacctgataataaaccgggcgcgtttatgacctttgtacttgccaacaagcttaggatcaccttcaatgttccatagatgaatttcttggttcaaaagattaaccaacaagaatttgttatcatttgataaagaaaacgaggttattgtttcatactcttcaataaatctctcatcctttgtttctctattgaacaacagtaccacattggctttacaaatacttagaatctcttccccgtcatctgttatttccaaatcagatatcttaagggttttttgtcctttccaagactccacgtctttcccatctaattcccacatgcaaatgctcttgtcacttaagccacaaagtatatatttcccacatggaaaccatgaacaggagactagaccagcaccaggtttttcataaatttggaggcatttgccagtagagacatcccaacgcctaatagcctcctccactccacatgtgaggagctcttggtcattaggactccatgaaacagaagaaacaggcttctggtgaccagataatctatgctttacagacagccttccatttatgccaacctatttaaacaaaatttaaaaagtgagacctaatttcatagcattaagccatattttattagtgtgtgtgtgtgtgtgttagagtgcaattcttgtgtcttgatcaattgggtgggtgggtatcagaagtaaaacattacaactaggatatggattggcaatatgatgacagaatcaaaacacaagcaatgaaaccacatttatcagttcatataaaaaatatgaaagagaacagaaaagacaaaatgtaaattctcagatcagtatcaaatattacctcccaaattattgcagttcgatcttttgatgctgaagctaaatatttcccattatgcgaaaattgtacaaaccagacttcatcatcatgtgcttctaatatctgttgcaatattaatcagaaaataacatcagaatatagatatgactcatgctatagaaagcaaagacagggtggtcgttgtaaagaaatagcaaaagaatggatcaacggaactgaagacaaattctttaccttttctcatttcccctcccttgaatccaactaatgatacataaatctcatttacaagaaagtgcattttaacaataaccacatgatattcacatccatttccaagatgccacagtttagcattcgcaaatctagtaaaaataactttataatcataatcaagaaaaagtaaatgcaaaagaaaagctaacgaacagagttctagtctgcaataggcaaacagaaaggaggaagctgcttccactaccactactaattaacaagtcaacaatatctattagacacatcatttctaacctgtaatgtactggaaggtatctgatcttttccacaatgatgatctgaatataatgacatctccttatccaatgaattatgaaatgggcatgcctctcgttgcaagataagggcttgttcaactagatgctccaacctcttttcaggtatcattactgtggggggaagcagtttctgcaattcctccagaagctttgatcgagacctcatccttagaatatctagcctaggagatggtgaaactaagcaggaagaaagttctcgaattctactactattaatgcaaagtggagcaatctctgtccttaaggtcttcaacgcttccatgaccttttcaccatttagaagctcaaaaaatttctgctccaatattaagaatgaggctgacctgaccatactttcatctgccagaccaattttatacaatgtggctacactgtcatcccaatttccatcaagaatttgttgcataaacagatttaccccaggtgagtgtaaaggtattccagactcctcctctagatgtgccccactctttccgtaaccaagcgagtataatgcctttacaattatcctgacaaattcctctttctttataacccctttggaaccaacaacatgttcttccccttcggatggtaggggccgagccatcaagtcactggacaagcctccaacaggctctttagaagaaccgttagacaagccaactaatcctttagaggataatttcattcgtttcatggatggttcttcatcttccacacctcccatgaaaagtgcccccttagcccatatataatttcagaagcgagaaaacaacacaaacaaccatacaactaagaaaatgcctctgaaaaaccacaagggaaaaaaatgtctgcatagaaaaacacaaacaacaacagtaagtacaataaaaccaagacctgagaacagaatctaaaacagcaaacaaattcctcaaattgaatcaacaaattaacataagcttagaaaatgtcagtggagaaaataaaactctgtatagaaactaacacaaacttaattagcataacaaataacacaacaaacaaatagaaacaacaaattaaaaaaaaaatgtatgcatagaaaacagaaacagcaacagtaagtacaatgaaactgagtcctgacaaaacagaagctaaaacagcaaacagattcctcaaattgaaacaacaacaacaacaacaacaacaacagcaataaaaataataacaataatgcaagatgcaagaatccaggcttagttacttgaaagcacaatgtttctaccaaatttataatcatctatcgaaacaattgagattgcgtgacgcctagcagataaaattgcaaaataaataaataaataataataaacaaattatatatgcattttccgaggaaacaaacagagaaaattggaagagtaacagaaataagataagatagaacaatcggaatcagaagtggcagatccaataagtggagaagaagataaagacggcgatgatccatccaccgacttaccgaacaagcaaagcaacgatcgtaaccaacctttgagatgcgatcgtcagtttaacaccgccgattccttcttcttccttcttcttctgcttccacacactcttcagttaccaaccaaaaccacatacgctctaaaatcccaaaccttctccttttctgcttgtgctgcaaagaatgataacatatatacgtaaaatataatataatacttttttttttaattataactatgaatatttgtattcattttggttttttttttttttttactataatgaatatggttatgacttgtatgataatcatcacaaatatcatatcaatcatgatttattattagataataatatataatcattttatattatgtgtatacgagttcaagtgaatgaagaagaaaaaaattggttagcggaatataattagccaaatttatcctacaaaaatgaataacttataaaattggcaaataattggcaccaatacattttagttttacacccaaattctactggatttctttcttttttctttttctagtcttctcttttatagctttcccttgtgtctggtgaatcactacccttagctagatacactttcgtttggtttggtaattggtatacgccttttccttccttgtttcttaaaccatcacgcgtttcccttctcggttctcttttcacacgcaaataacttcatttcaatattataataagagtaaaggattatacactctcagccttaaaaaatttaaattttgaagatataatttgaatttaaattatattttttaaatagaaatagattgttaaaatagtttaaataagaagaagtttaaattattattttctaatattagatgaataagtgaatgaagagataatgaatttgaaattattattttaatttatgtgtatatgatttttaacactaatatttaatcataatttattatatataatataatttttttttataataattgttttaaaaaaattgttaacaataaaaatagtttattaatgatcattaaactttattatcataatctaatcttcttgctgtgtataaacaatgagaaaacttagctggaaatgggataattaaggcacggttagtcgtacatgtatgtatctatattcaggaaggaatgagtatcgtggacattttaaatcattgagtagtgtcgtgtcagatatttctactcactccaaataactagttataataaaaataaatattctaaagattactaatttatattcacttatttttttaaaaactattttaatctataatatagtatataactctacaataacaatattaatcagcataacctcaatagttttttgactcattttacctcaatagttgctgataatttacaagaaaaataacaactgcgcagataggttagatgcaatacaaacagtaagtaagttgggattcattagccaatgaaattgatttctttacagcacacatttcatgaaattgatttatataacttttataagggaaaaatatatcagattaaataagtcagtaggtctcaagcatacatttcatagatttgatctaatccgtcaaattaggccaaattggctcaattctcttcagactaaatttaagaacccgacccagccttatttataggctgtttagattgggcccattttgtcacatctatgcacctcttaaatttcactcgtattatatttaaaattttggataactttctcaactctgttgttcctttatttaaattccttacactccagtgtgatcattaataagggatctagattttttgtgtgtctagatttattctactaacaattgttatatttagatatatttaatatttttcggtaaacaattttttaaaattttattaagatcacttgttatacatgtactttttttaatagtacgaatcaaagacaatatgaaaattttataataacttatgcatcatttacctgttgaaccaaatgaattggatcctatatatatttactttaattatagaatataaatatttttcactttttatgataaataagtacaatcataaaaatttatgtattagatttaaactatcttgcacctctcatctccgattttgtggggataaattatttccactttcttgaggataataataatttaaaacactattatttcttctattgtgaagataataaactattgttcctctatttaaaaatttctcactttatagttaactggaatcacaataattgaaattagtaacccgaattgttattgaattttaattattttaattgattatatttagatatatttaatattcttctgtaaaacaaatttattaaattttatggacatcattgatatatattcacttctttttattttctggataagagactacaacttttatggtttacaggctacgtttagctattgccttgtctcgaaactggctcagtggctcccaataatcaaaccattagaccatgccatagacagactaatgatcaaacctggttcctattaatcatgatattggaatgatcaaaacacaatgcagttcattggtacgtatttgagtttcaccttagtaatctacattgatctttaatttaatgcagattactaatgtaaaactccaattctgaatgaaaaacagcatctacaacccttaagaaactgcgctaagttttgtccttataaattatcaatttctgttttgtcctatgcagtcctgggttagaagactccattaattgttctttcatgcttatttcttttctttggtctctttcaattaactacgtttcaaaatcaacatttcacactttttaatttccttgagataattgtttctcgaataaaaatttaagccttgttacgaaaatgcatactccttgtagcagcttaacgaaggagacattaagtattcagatacttaatccaaccaagtcccttaaaattatgaaacccgtggaaaaagggaggttagacaacttcaaaccatagatagcacttaaaggttgatttacacatagcatatatatatatataaaatgctattgaagttttttaagcaacactgaaagaacttgctgcactctccacaaatcttcttgctcccttaaaccacctcttgtctccagcttgagccttgcaaatgaacagttttccatcttttacagttgctctaattatgtggtgcttgccaccttcatctccatcagcagtccttgtcaacacagacagaaaatagtatggcttcccgtcaatcacaggtgttgcagtctctaagatgttagccgtggccactgcatttggatcaaaaccaccctgtgcaattcaagttcagacttcagttagggcatgcaatgatgatatttggcgcattcattcgtgtttgatcatcaatcacttacctcagcttgtgtttcgccgaagaaggcctgttttcctagtaaataatccacctgtaacgaggaaacaccaaatcttgaatttcagccagaaagtagaaactggtgtcacaatcttcaaaaattcatatattaccatttttatttttgaatgtatactaaaaaagttaaaattagtaagggaatgatctatatgcaattgaagaaaaaaaattgtcactaattaaaacttagtggtgccagaattagtgagataaacaatttttctttactaaatttggtcactatttcagtgattttgttggtacttagaaacaaaaaaactgtacattaatggggctatatataagtgttccttattaattagaaaacaaacagaagtactagtttaaaacaggtttaccttagagaggaactcttcgggtgaaccatagtcagtgatggacttcttatcagttggagtgatggtgacaaccacgttggtggttgagtcaaagttatcctcatatctaacaacctgacccgtgtactcaacttctttgcttgggttccactttgagggaacagatagtttgaatccatttccattgtatggcaggaaatccgtgtctgtctttggctttccaaacacattggctgcaagtaaaacaaccaagttgctcaaataaatcatgtcatccccattattattagagggatcaactcccacctaacaacttatacatttgagataagctgatccttgacaccctattcgggactttatgaccaaatggttattttagagtctaataatctttgccaactccattctttcaattataatttctgcacaaggtttgagcgaccttatttttcaaaatagtctaagcatctgaattgatttcgttatcgacttccaccatcaagacctatgtaaattcctacccttggattgtatcctataatcactatattctttagcttagaccacaggtatctacggcagaaggaaggcaatcttgctcgattcgagtaagactattatcggcagtaaagcattcctttggcgtattcaactcaactgcacacctagacctcgaactttagatcactgattaagctggagaaaccccttactaattgatccatgtgattggtggtttatgatcactcaatttatttcatcttaaactctaccaagtaataaagagtagacaattcacaaaaatcactaaatcaaaagtagattatagtaacactttagttactatgcatgctagaaatcagttcaaagcaatttgcagctagccatttgggtggtcaacgatttttcatggcaccaaaaaataacatatttttcctgaagcatggcatgatctttgcaagcagtggacagtataaaaaaataataatcatgcaaatgagtatttcatcttcaaaagccaaagactaatgagctgttatcatcatttgagtttaatattgcatgatcataaaaagagagacaatgaaataccagcttcaccataggctgcatcagcaggttggactttggagccaacagcagcagcaccaatgagcacagttagagctaaccggcgagagattgggctgacatcaatatcttcttgtggtgtttgctgtttatgtgccttgcaaacaagctggttaggcttggtgctaaccatgatgcgttgtgatggggatctggcactggcaggggtggtaagagcatggtggtgcaagaaacattgtgtagaagccattcttctctgtgtctgtgatctctttctctcgttcactttcctcagactatggtaggaacttgttggagtttagtttcaatgtgttatgtggcaacgaggattttggatattggattttggaagaggatgattgggaaaattggattagattgtcgatgtgggataaggtaatagaaactctcattggtgccacgtcgtatcacgtattctcatttgcctcatgccatacccattttgggacaagacactgtcatattcattactttttgttatatatatgatcttgtattcgttcaagtacttgtttttaatatttttgttcaggtaattaaagactaacttccaaaacaaaatagaccaacttccaatcgctttgtgttttagatattaggtcgaagagcatagctacagtttctaatagtatatttttttcaattccacgttctattatttgttttaaagttattaaaaactataaagcaaattatacggattctcctattcttgctcttattacgctcaatatcatttcattttttttttatatattactttgagttcctccaaagaggatcgacttaacgatttacgcctgagagaggaggtttatataacgaaaactaaaaaaattaaaggattttatgtgaaaataaatggatatcaggttaggtacgtataataaggataagtctcaagaggaatatgtgtaatttattctaaattataaaatcccttattaaatcaaaagtaaaattcatcaaaatttattatttttcttaaatttcaattaataataaagaaggtcataaaaaagtgtattagagaatatattatcaatatttctctaagtttaattatctttttagttctaattttataaattttctttcttttgttctttcttatggatttgatctaattattttggatcattatcacattagagtgaaatacttaacaactttattgattaataatttttgcttggaattttagctagttattttagtaagatttctacttttaacgatcactttttttcacttataatgatcaaatcagatatattgtttaaagaaatcaaatttagtaccctcaagttaataatttattaattgattttaattattttaattgtgtaatattaatttcttcattaacttaaaatataaatatttaatgggcgtgttgacgtagtcataccatagaatatcgggctagtatgaatgtgccgctaggacggtgtaatataatgtcgcattaatattgttgttaaatatattagatattaagtttatagacaaaaaataaaacaattggaataataaaggaataatttgtggaaataaaaatcagaaattcagaatacaaaattaaaaatataatcaaacctaaattttaacaactataagatctaatacggccaaagactataaccatatagtgtggaaattgttaattagctcttcttcagttctgtaataaactcgatccttataatattttttgctttactcaagtagtcaattttttgcaataaatttcttttaatgtttagaatcatacatagtagcttatctggaacaatatttccagatcaagtgcattgttgtttacggcgtggctcggactccaaaaatcccaaatgggaaatgacggagcttcacgtgtgttttgttttcattttcagaacattgctcagttcctcaattatcactagttctttattcagatactacatttctatctttcttgttcgtttggtatttagtgtctttcaaatattagttaagaaaataataataaattattaatataaattataaaagaatataaaaaacataaaatagcattttttttttgtttttcaataaaaatataagtaacattttcttttttctttttgaaaactctcatttctatcattaaatcattactttaagaaataaaaaatcataaaataattaacataaaatctatttacagtaatataaaattaataataaaaaatagtccatacaataatgttattaattttttttcactattcgatctcaatcaattatatataatatttttttaaaaattatatcaataatatttttttaactgattcaaaatgttcaaaaatttgtattgaaaattcatagttaataaactcaatttaattcataactattattttatagtagtataagtttatttggacaaaattttctataaatatttttaggaaaaaaaaaatgaaacaagcaagcttgtgtcgcataaaaaaataattttaacttataaaagcatttatttatttttatttttctataaatatctatagtctgaaatttatccaactagcactattttttttattttttttaaaattcagcaaaaaaaaaactcctacttttattaatctataattatcaataaaaacattccatttatttactattcctaatttattctttaactatttttaaaaattactcacaaccacgagtaattattatctaatactccctaataattataagatctttttcagaaaattatttttattttttcatcatacattttttaatttttttagatgtattaatttttttacatattcttatttagttattctctctccaaatatcaataataaataattaagtgaatagagataagaaaaagatgattttaaaatgatagtataattatttgacatatttaatataattaatcaaattaatttttttaaagaacatgaattagttaaaaaaattataattaaaaatgaaaggaattactttttaacatgacagtcattataattatatttaactaaaaaacaaaaaaagacaaataaaacacatgacacagaatgcacaagacatggatggagtgtctaattttcaactagttaaaataaaagaaactaaactcttttcaaatactactttatttatattttatagtagtaacttttgcattttacactttctttctttctttctgccattcattataccaacgtataagcatctctttctctctctctctctctctctggtgtgactttgcagtagtcctttgttcgctacttcgcttctaccctcctctccattctctggtttgtgcacgaaaatcattcatttttctgttttaattgattaaattcatgcttctgcttcttcctttgatgctgcctcttttgcgtttctactggttttcgtttctctaatctgtcttgttgaattcactgaaaatttctccagttagggatttgcacttgtgcttaaactttgaatttcttcgtatattcgtcatatccctcattatatgtcaaatgctcgtctttcatgcccttctcaattgggttgaaaaaaacttgcggtacccctttttctttactgctttcccagtttatgctttttaattaagaaaagaaagtaaaaaagaaataagagggaaaaaaaagctaaattcattttgtcttcaatatttcaaataattctctctttggtcgcttttttctgcccaaccaaatacagtaaattgaggtgttagtctgtgttttgtgtcacaatcactcagagtttcattataacatactttatgttgtgcactgattcaccgtgctctccattttccttttgcatacaaatcctttaaatttcaacaaatacaatgtcaaaaacttaatcagccccatattcaggccttggaatgactatgacagtaatggaaaaggcataaaaataataattaaagttatcaagaatgctaaatagttcactgtagacactatgaagttaagacccaatttgcagcaataacaatctaaaacaacagacactaaatagacttaatggggttgaagtagtaaacttgatgtagcttaagccttaaatacagataggctaagttaataattaattgccagagatgtttctttttgtgaccatagaccaattagacttatttcattttagacgagataactttttgcctttgtgaaagtatgacttgatgtcggtagtatgttcttctcttttgttaatggttcgggaaaaagaaaattgtatctttatattcatttcgtgtgtgctggtttcttataaatggtgattgatgctgcagtggtgataggcatgatcgctattttcatggaatgttttgtgatgttcttttttgttcgtatagaagtgcaggaacaatgtctgagaaaatcacagctgaaaaccttttaaacacccttgtggaaacacttactgagaagcaaaaatctggatcattttttgaagacaagtcaagctcagtgagctcccaattcaatagactatttggaagccagaaacctgtgcaccatattttagggggtggaaaatgtatggtagttctagatacttaactgtaaaatctatcatgttggccttgacttctaaactttttttttgggtttccattgaatgatgcagctgctgatgtcttgttatggaggaacaagaagatctctgctagcgttttatccgcagcaacagctatatgggtgctttttgaatggcttaattataatttcctaactattttattctttgttgtggctcttggtatgcttggacagtttatttggacaaatgcttccagcttgtttagcaggttatccaagcatcttctcttcttttgatgtcttactttatgtaaatatattatgctactttacagcttaaacatgctttgttctctgttgggtgacaggaagccatctaaagttccccgttttgtcctcccagatgatatctttgtgaatattgcaactgcagttggtgctgaggttaaccgtggtttgaggtttctccaagatgtttcatgtggaggaaacctaaaacaatttgttattgtatgtttacttttatgtttgctttcattgtaattgttatttacgatccacgttcatgcttagaaaatagaaattagaatgtagtttccaggttaaaccattcttcagtttctgacaccagtatttgctatagtacgtgttattcaatcaattccatttatttttgtttgctacaacatcttctgtttgtgacatgttattgacatatctcatcaaaattgtcaattgctttttctcttcttcgaatttctattttgtactcatgtagaaagggataagtttcttgagttcgtgggaacttgccaagtcaactaaaccttatgtgacattatcttctaagagtcatttgatcttaatttgtttgttattgtgtggtttcctgatttgattactttgttgttgccaaagatttgaattactgagcaaaaaacacaaggagttggcacccaggaagggtgtgggtaggtagggggtgggggagactgcatccagccggaggtatgatagaattgaattggggaaacaaggattttaaattataagcttcaagggtcaatataggttgttttacatgacttggagtagtattatatcacaaagaatcaatgttggtgggttgtatttagtatctttaaatgcacaaccatgatgatgcactttctactttgccatcagttattttataacttgtttttatgttatatatgatagattatatttacttttatattttgttgcaaagggaaaatatatgctttttttgtggaatttgtgataatggctataacatccccaggttgtagtaagcttatgggctggtgctgtgattgggagttggtgcaattttttgactgtcatgtatattggtgagagacctgctttcttttcatctgttgatatagattagaatgtgttgaccagagtgtctgcttgaactattaagtcagacaaagtttgaaaaatataattcaaaatttcaactaatcctacaaatatttgctcagagaaatgtgaattattgaaattatggaaattgtattatattagcatttggtaaagccaaccttatgttgtgcttgtatgatggatatgaaggatgattaaaacgacatattaactttcaaaagcttgttatttgtctgtctatgccataattgtgtagcataggaaacgatttgaaagatgttaaattcctgttaagatgctggagtcaggagtttggatggtgtaacacaatacactcacacaaatgtatgccttgttaagtgttttctgataatatgctcttcaattaccaaatcttatttgaaatcaaatattagtgtatgttgatgtatattattttgtgggatagtggatctttttcttcttgaagttcgaatggatgatatggtacctgttagaagttcaacgatgatgtttttccttctagtttgacttttcaggtcatacctgatttgctaaaatttctattatgttatgtctaaggttttgttgctgcacatacactcccagttctctatgaaaggtatcaggatcaagttgacaactttgtgtacaaggtctttgatcagatgcaaaatcactatcagaagctggatactggtttgctcagcaaaatccccaagggaaagctcaaaggaaagaagtatgaatagattcttccttatgtaaatggtttgattttcaatatccctttctctcacttgtgatggaactgggaaaggctgaaggatgtaatgtaaatagggaaaaattctatgttgggatctttagaatttcttgtgtctcattatttgactggggatcaagacttcattaatgactgttccaaacttgtgaagccacttacaaggcgtttgatactaccccagtttaaaacctaatacataaaaaagagtaatgtagggaatgggaggagaggagagatattttaagaaagggaaagtattttatttgagtcacaaggggtccgggaaataaacaaaacgactattattcgtttaaaaagatcaaataaagctattaaggataattcagtttttttattattaattagtgtaaaagtttttctccgccaaatcccgtttaattttggagaaaacccaaaactgtctttttattttagtttgtatacttttgattatgatttaaaaaaaaatggtatattgtttttaagttgtttttctgatttcaagaatttataaaggtagtgaaacaagtttttttttgtatattctgaaattaaaaactaaagtaaaattaatgttatttttgtaatcatttataaaataatatagatgaaatgaatagcaaactaaaacctaccttaatagttctcatttgtcaatctggccatgctatttttaattttctcaattgaatccttgattagttataatataatgaaacttgaacaggatcattgagttgattatgacactggcttatagcccaattgatcgagcatacttgtatatgtccacttcattttaaaggttctgttattttgaattcgcccacacaagctcatcatcctccggattacttaacttgtaaattaactttattttttgaagaacttatctatacttatataaattaaaactactaacaaattaatcatttattaattgttttaatgtttatttcaaataaaaaacaaatacaaattagatattttttttccaaatctttacatcctaatataccttaatataatatttaatcatatatctatatttttatatttataatatttatcatttactcctatgtcataaaataaattataacacataacttgctcacataatataaaattataaatacatgaaaataatagaaataattatagttttctgattttcatttttaaataatggcatactcttctcaatttcaattataaattattttaatattaaatttaatttatgttaagttaatttaaaaatataaaatattatttaatatttatcatttacataatttgaaatattttatggttttattattattattattatccaaatcggttcaatttcaagtcttcttaatatatactcatttaaatacaaattacttgtattgttagaaatgaatctagcttagtcaagttagattcagatccacttgataagaaatgactcgatttaaagtcaaatttgagtttaatgtaaacctttatttttctacgatacatttcactttaaatgacacttaataagaaaaagataaatataaatactctctttggattcatatataagtaaaaataattaatttaatactaattaagaaatttagttgatattatttaattttactaatgtcaagtaaaaaaaaataagattatttctaaaatatccttaattgaaacttgttatcatgaataaaaaaatagtgattaaaaataaaaataaaaataaataaaaagtattttagaatgataatattaaaaagagcaaaattaattaaatttatttaaatctaacatataagatcacttttgagatatgatatatgtaaaacaatttatacaatatcattttatgtatctatctttctttaccatatcatttattatatttcaaaattttgtctctcctctcacttttcttcatttctatttctttgttttaagatttgttgtacatgtaaaaaattaataaatgttaacaatgtatttagaggaaagaaatgtccactactattcataaaaaataaaattaaaatatatgtacctaacccagtcgcttcaagccacaaatgtgtgatatatttgagtagtcacgagggagaaatgaatgatgaagcacacgtgtttgaaaagccccttttcctctcaaatgatcatgtttggccaaaacctatgttgtaaaggtttttaccctttggcgtttacattcaccttttctttcgtgagctagctgtttttggcatatccatgtcatccaagtgcatgtgacggtgaagctcaagcgtgtgtgcagcacttaactccacatgttaaatgcatttagcaacatgaagccatgagcttgcctcaagttttgtccaccatggaaatttgtatggtcagaagcttcaccacctcagccattgcctcctttgcactcataaaaaacgttgaattctaacaagaaaacaaaatcaaaagtgcctcgttggtagtagagaaagaacaaagaaggcaaacttatctttcagcaaatctccaagagaaatgctattctcacacaatttttttcaggaatttaagagagaaacaaagaaaaatacaaaagtataaaacaatacaaaaacaattagcagacaccctttagttgaaagaaagaaaaatgagagaaacatatatatatatatatatatatatatatatatatataaccgttaatatgacgtaataggaagagagataaataaaatgaacaatggaatgaaaagagataagaaaataaataaattataaaaagtgttattatgtgttgtaaagggtagaatgatccaatttggatttcgcaatatattaaaagctagccaccctatattttatcttttcttttcttttattttaaaaatacaaatttctaatgtatatataaatgtaacctaggtcacaaccgaggcagtctttaattttatagtataactcattctgtcatatatctgtgtaacaatggtggtctctatttgcaaggaagaatatggtgtgtccttgggcaatgactgggctgcaactcatgaatttggccacaacttttgtatctcaaatgaaggtgatgatgacgatgatgataatggcgtcattgatgtggccccagcggcatagaagaatttcgcaaaacatgcattgatgaggaggaggagggatatagtagtagtcagtgtaagcttcattctgtggtcttgcttagtaattacattacatttatgtttactcttggaatagtttctagtgttatgcttaattacggtcactataaatttgagacataattaatacatgttttattagtaattatggcttaattcctctctctctctcggacccaataattttcttgtcgatcgtctttgactctattatctgatcatagtttttgtatatataataatttgatggcaattggcaatgtacttgtaatggggtgaaggaaaatttgataaatttgacatcacccaattataaatggtttcctttaataaacttattatgatgatctatacaagagtttgctatgtgtaccttccagttcattttttccttggcagaatcatggttcagggaacacataaatcaagcttatatatatgcaaataagaaattaaattagtgagttgagtttatgacaatttcttagccatcttgtttcctaatgagggaagccaatgatccccattcaccttttaatttaattaactacaacggaaaatcctatcagaaaggagaagcgacctagctgagcactttttagtttttacactttgcatggcaattttacataaaattattcaaatgtgtttgatctatcttgagattcagagtattctcatcatatatgccttttctaatcacataattaattcattgttttctggattttctcctcatcagcgcattacaccaaaagctatatgtattgcttgaaaatgtcagagagacattatagatattatattatttggcgttatagaaagcttccttaggtttcagaaaaggatatatacaattatatatatatatatatatatatatcatgatttccaacctctcttataaaagctatctgccttaatttcttcattcactttggaattgagtccacataattcttcaacaaacgtctttcctgttttaccagcttcatctctgactgtgaaaccaaaccaaatttttccataacaaccttttcaggtcttatatagaatcggttagttagatttgttattttgttagcagaatttctaatcgtgtaaactttatataaggcttttttgttgcctacattgaagaaaatacacaaaagcataaaatctcataatatcaggaacatcatcttccatttgcttatctataattaagcaatggcctaggccatgctcatgctagatggaaagaaaatctgaagatatatataagtataaatttttagccttttatttagatgtggtgtaaccggaaccgtatgataaaattgagaagaaaatagtgctcaattgtttagaaaccctgttcaattttttcaccttttaattacaatcgtgtgcattgcacaactaaattactagttcattttacataaatttttttaaaaaaattacttagtatcgtttattttatcaattattttttgttcagtgaggcagttagttttaaataaatctaaacttttttttaccaaacagttttaacttaaaaggaattttaaaacaaaaaaataaaaatgttcataaaacttttactttatttttaaaccttaatagaattaaaaaagttgggtcaaacataacgtcataaccttaatattagttaagattttgttgattttaatttaaaagctttcactttttttagtctaacagaatccaaccattattatttttttattaaacaatccaaccattattttaatgatagcaaacaaactatcaataaataatataagcttcgttatactagtagtaatttaattaaatatacgccatatgtatttaaaattgatttctaatattcagtgacaatttgtaaaatcgttgaattgaagttaaaagtataagagaatatatcatatgttagagtgaaatgcaccacttcataaaagaaaaatattaagaatgaacgtgaaagaataaagaaatagatagtttgaaatttatatataaagaaggatagtcttgttattgagtgctctaaggagactaattaagaaatgaataaatagaaactttttattaaaaactacagttaataaactacattagagattattgtaaaagatcatttaaaacactttctcataagaaaaaaaaaatgtttttttaactaatgttaacatttttcaatttaattatctatgtgaaaaaaaaatttagattataagataagaattaagagagtctaattcaattggttaaataaaagtgtacgagtagttataaactctcatattctctgatattgatagtgacaatgtcttccatttctatggaaaaaaatgtaataagttatgttggaagttatttcttttacactgtgtgacacggattagaagaataaccatgacaaatacgcatgtcatggcaaacatgacaagccatgttaagcaagaagtcttagaactctccgagtagattgtcgttgctctcacattggcacgaccggtgcttgccaagctatgttcaatagccttctctgtagaatcaagtatctgcaaagcaagccacccacaaccaattcatataactgtttagcagtaagacaagcacgattaaatgaaaatgagattcgagaccttttcagtattttgcagggactggctcatcgtgagactactctttttgagttgttttgccaaaaccaccatttcatcagtcaaatcttcttgaatctttctaaatgaaaaagtgaataaaacagaaaaactatgaaaacacaagtgataacaataaatgcagagtatctagagagcacagtaaatgactataaaaattattgatctattacattagcacacatgatttaatggaaattattggtatcataatgataatgattcagaaacatcctcaggactagtcaatgaagacgatataaactctcaaatatatataatcctaatcatattaagctagtaacatatggtcactggtaacttactaacaatgtatcaacattgaccttaatacatcggtgcttgtcctgaagaaaaatatactttgttgttctagacaaattgacatatgaacataaggtttgtagcttgtaggttatggactctccataaaagcagtacagagtctatggatcaaccattacataaacttcaaataacaactcaaataaacagtacctgtgtttttcaatgtgtgcatgtgctgtagcatccagtttaataggtgatgtgtggtcagtctcagcaggctcatgcgctttatcttccgtacttgaggcaggtctgtccaatgaatcagatgagcaacagtaaaacagcctacaaaatacacatagtagtaagaaaggctaattttagcttacacaggccttcttctcaatccagaagaaaggagtatctgctttttttcctcaatttcagaatgtttttctttaacaaaattcttttcgaagtccttcttgggtacttgtgtgtcaatctgggttaaaaaaattgtggttgaatgattgtgcttattaggccaaaactaaaattacataaattgaaaaaaccaaaaaggagcttacaacttcatgatgcatttcatatttccaacaaagtcaacaaaaatacagccatcaaatgtaacacttttcacatgctatagtgaacatattataaaccactagctgggagtttggacagtttgcatgatgtcttgggttaatatcttactgtcattgtataacaaaaatatagtgaatgtaatttgattttctccattgtgtaataaatcctaaaagtttggttaattaggtgggaaaaagaggacggagttaaaaaattaaaatgattttgaacaaaagttatgatccaaagtaaaaatgtgttaagaacccacaagcagaagagctgagaaatagaggaaacgagtaacaaatacacaccacatgattaaccaatttggaagcaatggcttcaatcttctctgaataatcattcaacatagcctttgaaatcctgcataaccatagcagagcatttatacacacaaatgaatgcacttatatagtttcaattataattccatgacacctatgtgtatcacatggtaaataaagagacgtacaataccttggtaagccttcaagtgtcctttcttcagccaactgttctaattgttcacgcaaagtagcaacatactgcaaaatccaaaaatcgacaaatgattaagtatgtttttccagagttaacaaatgactaaattaataaaatatatcaacatcaacatcaacatcaacaataccttcaacccaagttaattggggtcgatggtagatgaacccaatgacagatacgaggaagttgaaaaaaaaaaaaggaaggggaaggggaagaaaaaaggaaaatgagtcaaaataaaagaaaataagataaaagaaaaaaaggtgaaagaaggagggggaaatgaagaggaaaaaaaactaaaaatggaccgtctccaacacagagataataatgggttatagtttttctccactccgtcctaagacacaacgtccgctaatctaaattaataaaacatatatttcaataaaattagaaaaggtttatcttcagacttacatgcacaagttttgcttgattttgctgttgaggagcagctgcaagcaacctcctcaagtttacttctgttttactgattcccatacctacaaattatctaaaaatcaaacttcatcaagcaaagaaaaacaggtatttctgtatcaaactgaaaaaaacaaaatatcagaaaagcttatccgatcaaactaccccagattataaacacaatcaaacaccctgaatatcaatcaaactatttcaaccagtttaaagttgaaaaagttaccagaattcagcaattataaaaaataccataccagaatcatggccaattttaatcgaaaactgaggacctacaacgtacttttttaccggcaataataataacaataaagttccaattcagaacatgaaaaacagtttagatattgttctcgactaaatttaccggtgaacatcttggcattctatttcctatccatggagatgtttccgaagtgaaaaattgcaaattccaacactatactacagagtaaatgctaacatatatcaaacagagtttccagaaccgtttctaaaaattcaaccccttacagtggagaaagaaaagtgtttttaattacctgaagagaagaaatcagaggaagaaacagatcgtgtctccggcgtcgaacggtggtttccgcgccgttgcttcaatgctattatgatgcgtcgtacgtaacggagtgtgcttcagttatcagttaagatccaaaatgagaacccaacccgaatccggaaaaactgaactgcttctttttatggacctggattgatagtaggtgaataacgcatccaaggcccaatgtctggcagcgttttcctttttgtatcacttttttagttttttctttgatggaagataaatttttttactttccgggaatcataagttggaaaatttaatttttcatatttggtatcaatttttaaaaaaataaaattcctgagaaagaatattttctgggaatgtttttaattaatttcgcacaaaaaaattttcacatgtgagagagaaaaatcttactttttcaaataatttttcttttactaccgcaaaaatatcatcttactctttattaaattatttaattatttaatgtgataaatatattgaataattctttgattcttaagaatcttatattaagattctaattaatattatcaaatcctgtccggactagccactctttgattctaagtaatttttctcctaccgaaggcttccttaatgacaccactctgttttttgagaatttaatttaattttaaaagtgatatttttaaaaatatcaaaagcaatgatttatattttgagagatgaaaaaaaatacatgatcaaaatcaacatttgcttattttacgaaagctaaaaatatatttaactcaattatgaataaaattcctacttcttagtagatcttaccccacctttcccacgttacacttgtgtttaaatttgtttcatgaacttgtccttccgttgaatttgagttttactttaatagcaatcggacaacattatttgtcgtggtttttctaccatggtctttatttaataatttaatatgcgcgtacataccttagtgtgaatgtggtgagtaacacgagagttcatatgataagaatgcttgaaggttacattcatcttatttttatattataccattattctttacattttttttcctttcaaatataaagattataacagggttaaaaaaaaaattacttcagcattctgctacactaaagactaaagtaaagttgggtgattttgatttgaagccttgaaggtaaaacgactttcgagttggaacttggccttgggctgatactttgataaaaactcaatgtatatttaattaaacttatttttaaaaatatacgttattttattaatttttgaaaaataaataagcatttatctaaaaatttaagtgtgaagaacatcaagtacatgtattaattagtgtgagattatttcaacttaatcaaatattttgagtttgaatcctgaaaatattattgcattaaatatttgaataaataattttattctttataataatcctatttaactcgaacataattatatcaatgtcaaattacttatgatttagaaagaaagaaagaaaaatgaagtgctaagatgaagggagtgatttacatgtatgtatccagaaaaggccaaataacattgaatgtctgatttggaaacaaaagtggtaatagctggactggagcgtgaatagagattagaggaattcctatcccatttggtgcggtgaagaagttggctgcttgctttgctatgaactatctttgtcatttggacctcaaggcttcacccccgctttctgtctctcaccaaatttaggttatgcaactttactgaatctccattatctcaattctgaacataaaatagttaacattatatatatttaacattgtgtatactttttatatatacttttgaatgaagaaaattttgattatatatcaattttatctttattctctggatcactaattatactgatagtgatttggtgtgatcattagttttctaagtagagtatctagaataattattaattacaacaaattataaaaacaaatcattggtatacttaataatatcaagaatagaggtataattaaaatataattagatttttcttcattatttttcaaaatatttttgtttgtgtattactctttcagtctcataacaattgtcatgtaaaaaaaattatcccaaaataattaatattacttatcttttttcatttatattcatttataatattaatgatatagttacaataactaataaatgaattaatggtgataagtttaattttgtaaaattttattatctttcatccatctattagtttttcttgatatgagtaaattaacataagatgataattataatgggatggaagaagtaatagtgtgatgatatatggtacgttttctattggaattagcataaaagaataaagaaaattgaaactttaaaatatgaaacataattaaatgtaaaaagaaataaataacacagaaattcttaaatgtgtgtatcaaaataagaaaacattcagcctttcctaagttgtcaacaatgtagcaacgatagatgaagaaacttctcttaattaataaaaatattcttaatcattgataatgtttttactcctttaaatattatatatttcaaacaaatcataagagcatctttaatgtggtagatcttaaattgagatcttagactactttttggtagatcccataatgccaaataggattaaaggtctttttaagatctcttccatttttttctttaatggtagatcttattttgagatcttaaggagagagaaaaagaaagaaatttcacaagaactcatcctccatggtggagatctcttcaactcttttattggaagatctaatgaagatcagactcaagatctttgcttaaaatcttatactaaagatgctctaagaaaatttgagtttaatgaattaaatggttaaaaatgacataataaataaataagagaaacttagagacgtaatgattttgtctctaatattttagttatttttttataaaaaaaaaactcaaaatgcatattcaaagacaaatttagagacgaaaattattgtcacggaccaattctatctccgaaatccatccctgagaatagacaatatagagacagttctagagacaaacaaatcagacggataattccatatctaaataccgtctttgaaataccaatttttttctttctctgctagttttcgttttttgtcatagacgtactatttttttttttcattattttagatttttttgatagaaatgctaacgacccaataaaaccgaataattacatcattcacatgcaagatattatccaaagtacacactttgatttgagcttaactcaaggctcaccaaaatttctaaaggctatttgctttcaatgttatcctattttcactcatgaaaggatactttctagtacataatgaatcatatataaaaatcttgtattacctacaacattaagtattcaattctcatgttcacgtgtatagaaaatctcttgaatggattcggagattggtctctaacttatagccacaaaatattcaagttcacacatacacacaaaaataagtaacatgatatatggtcatgtttaaaaaaatatacaattttatcaaatactactacaattaatagattcatcaagtaattatgatatttgttttaaaaaatatttctcttattatgtcatactagttaagatcaagagagaattcagattctgcattatcctttccactcgtttgaactaataatgaaaatttctgagttggccggtattcttcttggaccatttttgtaaccaaaaagtaagttacaaaaatggactcatgagacaggttgtatatttggtagatagttgatgcctttgattagttgatgtctagatgagcatgaaacttgtaccacatctttttcctttctttttcggacaatgcctcagccttatcaatctccaataatatacaccttgtccccgccacgtgtcaacatcacaatgcactctcagatagcatccaccgtgtgcatggagaattggattttccttgtttccgtttcatattgaacagcaaaatctttgcagaccccgttttcaactgacgccacatgtgcagctagccatgtttttctcgctgttgacaagcacaatactatttagtaccatttttcatgccatatttgctctcttctctctttgtactaactaggatatgttactgtccttcttcttgtttaaaactgtgccacaacctctgtcaccagactcctcaagctgaaccaagcacttgttcagagggagttttgtttcttcagtctctagttagcatctatttttatagcttctattcaacaagcagcctttgccttaaccaaaagaaaaactctttttaccttaactcaggtggggttcttctttgtttttgaagtgtatgtgtttaaatcttcttgagataatacttagtgtagctctccaactaactgtcaattttttcccactttgttgagattaaaagtttggtatttttttcagttcttgtatttctttattgttttattctttttctgttcttgttaatcaatttttgcatgtactttcaaatgtaataataggaaaataattttcctttccgggtctcttggagtttaaacattccttgctttatttattcacacaattgatcacaatggcaaaatccaacttgtggttccatttcattggtttttcacgctcttggcaagtcaagttgcatacacttgacccgaatgctttctttctttctttattatttttttctttcacttcaaaaaattctatatgcttatttgattactcaattagctgaactatgcagattattctattttactctgcttataaagtctgctctaagtttaaagttctctctcctctcttgttctaacagacaactggtttggtgaaccatgaagaacagtatccctggttgggattttgagagtgatgcatgtctcaccaaccaaagaaagcacatagggtgtgtgttatctatctttgtcaaagcaggatatataatgtccctattaactttggcttgattataattctctctgtggtcaattatacaggccggaccaagaacttgtagagctcctatggcaaaatgggcaagtagtgaggcacaaccaaacacataggaagccacttgggaattcatctaacttgagacaggtgcagaaaactgatcattcaatattaaggtctagtggtccctatggaaactcaagcaacttggatcaagaagaggccaccccatggatccaattcccacttgaggacccactggaacaagatttttgttcaaaccttttatctgaactaccaccaacttgtgaatttgaatcttacaagccaatcaagcaattggaagagggcaagtttgccaaattttttgcttctagtacctcccatcatcctactacttcaagttcaaaaccactaccacctaacatgaaatcctcatgtgttcaacgaatcgaagggaatcctaatcctatgcctgctccaagatttcatgttcctgattcatctcagaaaatcaatgactttggtgcatcaccaaaggttctaaattttcctcacttttcaacaccccttaataatgtttcttcagcacctggtagtacacagtttaggggaaaaactactgctaacttgtcacaaagtgaggctagagagtactcagtgatcacagttggttcaagtcactgtggcatcaatcacatccctcaggagccagatgtaagtagggtttcaagaagtggtgtttgggccactactaataatatgactttatctgctgagcctgaagctgtaagagattgtgtccagagaccaatttgtcctagtagtgacaaagaaaaaccagagatgattgaaccaactgtgacttcatcttccggtggctcaggcagtactggtattggaagaaattgttccctatcaacaagagatcattgccaaaagagaaaagggacagaagaagaagcatctgaggaacaaagtgaggtcatgctcttcctctttccatttaacttcatgaatgcatcttgcttttttctttttgcctgatggcctcggaagatttagtcaaaaattgaatggaatgacatgtgtgatccatgtaactattctcatttagaagaacaagattttgttgttgcaccaacattacattagtccaagaagaattagatttggatttcttagtaaggtctcatattcgagtcttgtaaatagaaaatgagtagttagaagtgaaatccgctaaagatcatcagccaagttttctgataatgactaatcataagtaaaactatcatagaagacatgataactcaaaaaaagattcgttgttggcattattgtaggctgatgagatgtgtctacatgtgtaataggccacagaacttaaagcagctgatggaaacaaggcttctcagcggacggggtcttccagaaggaaacgtgcagctgaagtgcataatcaatcagaaagggtgagcgcatggtttttttcttgtaattttgtgatttgtgttgtgtcaacttaattaactcttattaccggtgttattttactaatgcagagaagaagagataggatcaacgagaagatgaggacattgcagcaactgatacctaacagtaacaaggttcgttatcatataatgcttgttgacttgtcactgcgttaacttttttctgtagagatgcatgcatctagaccgaaaacgatgcgtgaacatttatacgctaacagacagctagagatagctagatagaaatagaagaaaaaaagaataaatataataaataatacgattgatgagaaaaaaaataaagagcataaattagatatactgtatagttgtttatgtattattattctactatgtaatattactttgggtagactcggatgattggtaaggttaaaagtggtattactctacactttctttttttttttttttgaatgattctactttttcgtaagattcaatcatgggtggtgaaaaataacaatgggttgtacgcgcagacagacaaagcatcaatgttagaagaggcaatcgaatacttgaaatcgcttcagtttcaacttcaggtacaacttacacatacacatgcatgcatgtgatgatatattctaacactagtaaaatgtgacaattttttgttgttggtgataggtaatgtggatggggcctggcatgacaccagtgatgttcccaggaattcagcactatatgtcacaaatgggtatgggaatgggtgcaccttccttgccttccattcacaacccgatgcaattgccaaatgtaccacatggtcaagccatgtctgtgcctcagatgccaaaccagaatttaatgtgccaaaatcaagttttgggtgccgttaattaccaaaaccatatgcaaaacccttgccttccagaacaatatgcacgttacatgggttaccatctcatgcgaagtgcctctcaggtaatttaattgggttctttcaagtgaaattttttcattcttctttgctttacttaatcatttgatatttacatgtgcaccaattattttttttagttcttttgttttatttttttagaagaaaagtaaaataatttaatattattatctaattataattattatatataataaatttgatagttttaaaagtcatatcaagacatttgtgatgagatgttatactcattacacatgaccaataaacttttaaactttatatgaacgttttttatattttaatcaccgttgttagttaattttatttgtttggttttatcttgcagcctatgaatgtgttcagatatggttcccaagcagtgcaacatagtcaaacaatgattgcaccaggcaataatagcagcggacccatgagtggaacagctaatattgatgatcttgttagtggcaaagcaggtaagggcactagatacttccaacttttttggatttttattcctttttaaaaagaaatttgcttgtttagttacatttcaagaaatcttaaaaaaaccaagtaatttaattattataaataaaaaataataaaagaaaattaagtgaaagcacttttaacaaaacaaaagtttatttttattctattttcctgttttctctctcccttctttctcttgctttcttttttttttttcttttcctttctctactttgtgttttatctgatatgttctcttctttctctttataatctcttttaaacttaaaaaggaaaaaagaaaattgttttttttcaaggaaactgaaaattgttaaatagtttatactttatttttaaataatttataaaatatctttaaaaaaaaatggatcagacgcatctttcaaatagtttctatgccttacaacatttaaggataaaaataaaaacaaaatatgtttttaacatgttaaatttaaccggcatttgataaggaaggaattctttttatgttcgaaaatcatgattcatgaaaattatattttatagaaatgagtaaaatttgtttggttgatgatcaaaaaatattttgataaattttctaaaaatcgaggagttatataatttttatcaagttattatatttatttatcatattaataaaaataacatgatatattgtaataaaaaaattaaacttaaaaaaaaagtaaaattctcacctcctcataaaaaagttttcatggaaaacttcttaaaaattatttttcaaaaatattattttcccaaaatcttttttttaaaagaaataccaaacataaaaaaattaagatttccaacccaaaatttaaaaaacaaaacaaaacgtctctcctatcaaacgtgtccttatgtccttatagttatttttaatgtaagttttaatcttcaaagattttaaattttttaacaataatctgtttcactatgtactgataacgtaatatatatttaaatatttcatgttacatgtcattttatactcactgacttcacataattaaatctatgtcatgtcactgagttatcttccttctccattacttcctttacactttccaggttcttccacctttaactgaataatggatagcaataccttaaaattactcaattgggggaattaacaaatggagtacgtcaatcccacaagcaccaatatgtcaaattttatgcagtttgaagttcatgctatttatatccaatttaaagtttgttgtttaacttcgaaattatatatatcaggcaagtccttgattgtgggtcaggcatgtaatcagctcctgtatgggacccatcaggttcaagcatttgatgtattgtttgtactttgtagattaggaaaagtaaattatataagttaacgtgttaatttgtactttgtagatctatatctgaacttacgataacagctattattttactatcaataatatagattagggaattaaagattgaaattcttacgttcgttgtcttttaccttagctggtccatatccatattaaattcgacacctttttgtttttttatcaactgatgacaaattcgacaccttatttttaattctcatgaaattgtgataatactcctctttttttcttatgaagtcacattttttttatactgtgacgtgtgttatgagttttttatatcaaataaaaataatttatgtcttaattagttatttaaacgggagatttttactttacataatttcattcaaaatacttaaatttttcaaccaacattaaatatattagaatgtttgtaattactaatgaaataaatttttattaattagaatactgtttgaaattttgaaaggtttaaatatgtatatattactaaagcttttatttttattggtgctaaataacattaagtactctatgcaatccaccttacctagtgcaatgaccctttattaataatatcattagtgccgttaatatttttttttctcttataagaaaaattatacagtaatacacaaaaagttaaaatggatcacaactgaatatgaaaatatctaaaattataccggtatgacactggttatatatggatctaagaaatagtttcggacaaatgcatataaataacccaaaagatacttgaaaaagaaacagtataacatattttttcaggaaaaaaaaaactatagatttttattaacaataataagtttatgcaaatagataaataataaaagtgaggacataacacgcatgatgcaaactttatacaatttaatttaatcagataattaagtaatggtaccaataacttaaaattacttaaattgaatatatcataaatttaatacggacagttatttatttagtcagcatcagatactcgtactaaaaccacaaataactaaaacatttttcattattatttttaacatttaaaattgattaatgaaaaaaaaaaactcgatagtcatcttaatatcatcttttcgttcttctttttttcactcattgtttttcattcgtagacaaaatatcccaagtcactttgcctggttggaatctttgagttcgtgatatgacatttaattcaaaccttaatccatatccaattatccatagttaaagtaaaaacggtttaggtttattttaaaaccggaaattcgttctacaatcttttttaacaagtctccctgcttattgtacttgaagtgcacaatatgccatcatatcccactgccatatgtttttattatattctccatttgaattctaataacttgatttcattatcacatctgtccccatcatctttccccacgaaaggcggagacgctcaaaaaatttgttcaaacagtgtcaactttaggataagatcatgaatcattatattttttttaagcaagcaaattaatcaaatgatgtcaaacacatacaataaaaacgacaatgatagaaggcatagatgacacccacataaggggaaatgtaatttataccaatgtataaaaaggatgtaaaattttatgtaatttttttgttctttacattttttatatattattttatacttatttttaataactagtaaaacacatatgttattgcatctgtgtatctgcatttatattatactatcatatttattatactaaaatttatatattaaaataatatctcttattatatataaattgatgtgcatattaagtttagtttaatatgttttgtaatgtatagataatatttcttatttttatctttaattatattttttcttatggtacatatacttcaattctaaagagttctttttatatatttcaaagtaagatatgtggtaaaaagaaaaataagataaatgaataaatatataaaataaatataaaaaaatatagaaaataaagattatctgaatatttttctaattataattgcaaaataaaataaaatcatttaaataatgtttcctttgatggtaattttgaatttgttatcattttttaaacatttatacccaaaattaacaaattatagaaatataaaatgatatttgtttttcgctagattttgaagtcattataagaacacattaacttaaaaatattaaaattcatgtttttttaacagagcattcatgttttaataacttacataaattcaaacaattaatcaatatagggtttatttttctaaaaaagaaaaaaaaagatcaagaagaagactttgaatgctttaaattcaagataataacttaatgttccacgaattataaccatattttttctatgttgtgtgtcatgttcaattccatccttccaaatgttatcaaaatgaatatgtaaacattatgtaaatcaaatttatactcaaaagaactatacataaaagatgaagttaaagaaggagaagagaaaaaaaaaagtagataaaaaaaaggttacagaaaaattattgtggaatgagaaaagaaaaacacaaaattacacaaagtatgattcattacttcattataccttcttagcgcaattaccaatccttcattttgtttgaaagacatatagctcagaactaacaattctttcgccaaaattaaataataaataaataaaaaaagaagcaaaatgacacttcaacaacaaaagggagtggaaagcaacaagaatgaaattcaacaacaccagcattggaaaaattaatatatatatacatacatatatatatatatatatatataaccacgtaacccattgtccgaaggctttacgttatacatagataaggaagagagatattgtacccaacattatccttgcatatacaaagatgctattttcaaatttgaactcatgaccaacaggtcaccaagacacaactttaccgctgtgtcaaaactttcgttaacaaaataaaaacccaaaagctttgtggttcccaagacacacccaaacaacatatattaggttatcttcttccaatcctttcgagttgaaccacaactgaaagttgtaaccttggtgcaactttaacattcattgctcaaaccatgcggttttttcctcaattgaatccagaaagaacaaataactaaattgaagtaacaaacactaaggaggaagtgaagaagaaggtgtagagagaaaaaaaaaaaacaatggaggcagaatctaataataattgaaataaagggtgagagagcctaattaatattaatgttaatatataaatgaataataaaatggtgtcaaagtggaaaaagctgagtgattaatgggtggttatttgatttttgtttttagttaaggggtaaaatagtctaaaaattgtggagacaaaaaatatcctttttatctattagtatagatattaaagtagtaacaataattaatcttctttagttatgctgattaaaattgatttattaaccaaaattagataatcattcattaactattcttcatttttattgtacaattttacctttaaactatttcttaaatgataaatttttctcttaacttacgtaatatcccattatttttatattattagttttttttattctatcattttttattaattatatttaattccaattttttattatttaaaaattttagagaggcacggagtctctattcccctagtaactataatattaatattaatattaatagataggtgaatgattaattcgtgccatccaacttcgtcgtatgtggactagcttcttcctctatatacctctcttcactcttcccatacacctatctctttcttgaagttgcatgttggaaaaagattgatatgtatcaactctcacaaactttatttcccaattatttggtgaaaagattatttcattatggtgttaatttatacccacaaattgaacttaggagtcattatctcgaataatcgctggaatattcatattgtcatattacatagctaaattaatcaactaactgccactaatagcgatataaaaaaaataaaaaatcgaaggctctaattattggctttctttttctttatttatagtttcgttgttgaagcaatcgggatggatgacttcttaaataggtcaaaaagtcagaacataattattactaaaaataaataatagacaaatagttatttttgttttttaatatatagaacgttgacaaatttattcataaaaaatgaaaatttaaattttggttttcgaaagtgaaaaaagtgtgataaattcgttcatccgttaacttttgttcattactattaatgaaagaacctacgtgacacagacggacaaaaatgtcacaaaataattactaacatggctgctgaatagattggagcaaaatatcagcaaattttcattggactaatttatcagataccaaattttgtttcatttaaaattaaaatataatttaatcttcatcttttctcttttttattattacaagcataacattacaataaaacacttaaaaaaataaggaagtgaacataagttagaacaaacataatattgattaataaacataacttgtgtgttgctttgaaatttctattgtgacgatattaggtaatgacaaaatcaagttgagactcatttttttttgtaaagattaacttaatagttgtacattattgtttgaatctcatattttgggtaaggtaatgtcacattataaatttcatagcaataaatatattatgcttattattatgtttgttctaacatatgtttgttttcctattttttaagtgtatattataatgttatgtttgcaatgaataaaaaaggtagaggaagatgaagattaaattatattttatccttaaatgaaacaaaatttaggatttaataaattagtccaatggaaacttattgatattttgatccattgaaaacttactgacattttagtctattggaaacttactaacattttggtcaaatctattcaacaatcatgttaacaattatttttgtaacattttcatccatctataccatgtaagaggctttttcattaacgataacaaatgaaagttaatgaatgaatttgtcacatttttttcattttcgatgactaaaatttgaattttcatcttttagagacaaatttatcagcgttctatacattcagagacaaaaatgactatttatccataaaccattataactaacctacttgtattgtgtaatttcctttgcactattaaagaagaatcattcttaatgttctgtttggagattgaaacaaaaattagaaaaaaagaacataaataaagagaagagaaaaggatggagaaaaaaaaatagtttgttgcttaattaaaaagaaaaataatagaaagacaatgtcagtagttaaaaaacttttaaaaacttttatatctttaattaatttaaatgtaatgatgaatgtgtaagtaaataaatgataactatattattttttaaaaaaataaataaatatgtttttattttcttaaatttaggctacttttattttttatcctttaaatttagttcctccatttttttaaaaagtattattttattctcttctacaataaaaaaaatcattacaaattatataccttaatcgttaaaaattaatcaagagagaaaaataaagaacaaagtaaaagtcaccccaagtctcttattcataaattaggagaattatataatattagaaaataataatggaaggttgagaaaagataaccaaataaaaaattatttatctgaaatgaaaaaatgtattttttttttctcatttctctctcaactctctgttccaaacatatcattagtagacattggtattcagctagctgcaaacaacaaatgtgatgtcggtaattttggctgcatatattttgatgtttaatggatttgagtggttggctggttgccgattggtcaaggaactgtggggtatatctccttaattgctcacaaattttgttgatgaaccttcattcttcttcttataatcttattattatatgtatattaatatatatatgtgtatatatatatatgtcggagccttgaagttgaataattagttagcagatggaagtttccgacacaactaacacagagtgggcaaaacatggccacctcatttgcaatacatctgctgtcttttttagtctttacgtgccaaactccaaaatctgtcccaatgactcgacacagcatgaagataattaattgtcttaaattaagattaattcagataaatatttttttctatttatcttttcttattattatattatatcatctattatatttgcacttatcccactttttcaaggtgtcaaataattaacatacattttgctttcacatcttttatcttcatcatgaacgttttaggacatgcaaagatatattttccaaatattgtcatacaagtataactcacctaatgcaacaatcacatcatttattaccttttcattttcagcatgaggaaagtaataaattatagtagtatcattgaagaaattaaggatttatatctcgtgaatcatgttgcttatagtaaaatatacattgaatataaggaaacaaagattacaaaatttatgaaatgcaatgaattaataattacttatggatgtagtaatatggtggtttttttcatcaacaattagttgtttacagttatatcatttatttatagaaattaaagacgatataaaaaatttccaatactcatacattttactcaattgaatataaataactaacttttttatttagtatgaattggtttttactgtgtttgttttctaattggataattttctttagttaagttaaatcatgcgtgagtgtaaacattggatctagaaggtgaagattgtgtgtatccaacaaatccataaaccatggtagtttccttctatatatcaggggtttgctaaattattcaagagagaaacccaatgggtttacttttttcggtttctcctcccaaaatataattaagaagctcaaaactgcagagccactatctgcaattgggcctatttgttttacttcaagccttgtatattgaatagtaagtgttcggggatgcaccgttgaataaaaaataacaattcttccggttttaaatataatgaataaaatattctttttttcttaaatataagaaaattccaactatatttttcctaatttattgttatcatttttaaaataccctttcatttaattgatgtattagtttttgatgactttttttaaaaaaaaattctggtaccaaatttcaatgaagaataaattagaaaaatactttataattgaaatttgtacaaataattatgagtaactaactttcttagtcaatatgaattagtttttttcttatatttgagtctaaaaggagtattaaaaaaagggtctttctaatctgtgtatatttgttaagaaactaaaaaagaataaatatttattgcataaatcataggagaacataaaaaagttataaatgatataattttatgtgtttcaataatttttttctctttttaattttttaatcaatactcaaagatacttggtcagcatttgtcaaagaaataaatagttggtgatcattgaccaagtcttttgggatcaattctaactatgatacataatcatctaatgggacttggtattcttgcacccctgattttcaagttcaccttcaactttataattctttttttaaaacaaaaatacccttatgaaaatacttgttaattgtgagttgttgttattaattattaaagtttttttcacataagcaagtatttctcataaaggttgcttcttatatataagttggatttaaaataattcaatgaaatgttttgattttttcatatgttatttcttaaaataatttttctgattttttaataaattactttttttaaaggtgaaaattttattgaaacatttttttaactatcattattaggaatgttggctgtctgatgagattcgaggtatctctacaaattttaaccccatccaaaagtgaaaattttattgaaagacttttaactaaatgacttaaatccacttttagtttctacatttatggttgatttcgttggaaagaagaaaaaagaatgacatagaattaaaaatttaaatagaaaaaaatatgtgagattcacacaaaattttataaatttctttcttttttttttcacaaccaaacatatccttagtgtattttttatttttttttcttgttgtcttccatagacgttttgaaaaacaactcctttattacttatgcggtgaactacattgaaattaatgttattgcaatttgaatgataaaaaaaaacatagcattaactgtagtgttttcaaaatttaagaattttagtatatcattattttgtcgttaatttttcaataaaaattattaacataatatattaacacgaacgtatcaacatggttagttagttggacatataactaatatgtgaaactattatgacatttatcacataataccatgtgaatgtcacgtcaataatttaagtttaataaaaaaaattgaagacgtgaacacccagatgttgaataaaatattttaaaatgccaaaattgtacaatcatgaaaaatctttttgaaggcttatgattgagttgcaaagtcgcgtaaagggtggaaatagagattttttttgacctaatttaaaaatatataatttaatatgatttatttatttgttataaatttttttaaaatttgatttgatctatttaaaaatttaatttaacctatgaacctatttttcaataaaaaattaattttacaaaatattttaaattaatttagaaaagttaaaaaaatattttttaaataaaaatatctcaatatcttacttatatttttaaataaataataattattttataaaatttttaagataatttttgaagtgattcatcatccactttcataataaaaaaatatttttaaaaaaatgaatatattatttttaagttttaatatatatatatatattattaaataagtcaacttaatagatctaacatattttttttaaagattaagtttgatctttttatttaaatagacttttcaaaaaaaattaatttaatctttataataaataagtcaggtcagatcttaaatagatcagactagactacagatctctaataagtggtctggctcatttttatcccttgggtttaaagaaagagatgtgagacgcgtggcttcggcatcctcgtcggtttgggtggcacaacgcaatcagcaatcccataaattaaaaaccaaacctaacctgcaatgcactttctttcccaatcacactccaattatatgaatgaattttcttttccttttctttttccttctctgaattttctcggaaaccaaaccccgaccaacctctctcccctaccttcgcgttccgatccagctgagagtggttgggctctgcaaaaattagctgcatgagctggtttgggaaactccgtttattctccaatttcaattcctttcacttcattacttctttcttaatttttaccctccatttttcaccccaatcgctcctttccttccaacccttgttattgatcaacgctaaaaccaatctcaatcgtaatttccggttttcgtcacaatatggagtcccgattcaagagtaatccgcaattacgcagaggtttgttaattgttctccaccgcgctgttttttttttttgtgtgcgccttttttgttcaacgtgtctacagtttcagtttaaattgatttcgttttgtagataccagtgcatggagttttgtttttctatataataatgatgcattttgaccaaattcgttatgtagtacgaatgaaagagtaatgtgaacacgtgcatgcatttttgcgtaatttgaactttgaaatagatggtttggctggtggggtctaacaatcgagcttctgaaagtgattggaagaattagattgcaaactcttcgaatctaggtgcgatgatgacgactttgggtatgtttggattaccgttgtttcaaatgtgttcagaatgaaagacacaaagaggatcattctctaaaagtacgtgctcaaaagtaggttcagaacagaatgatgagtgtatgatttgtagagggaaatattctcttgggtcatcctccaaattataaaaacagaaagttagaagtgaaatgtgcttgtgccagctcgtgtatctgagaattgtctttttttcagaagttttgattctatttttgtgtatctgctaaagttgacttggattccctccctcctccttccttgtaggcctttgctgttcaaatgatgacaagcagcaggagaggtccccatctgttattgtcattggaggtggcatggctgggattgctgctgctcgtgcacttcaagatgcctcatttcaggtattaaagttttttgtttccccctcttgaacatacatactttgtacttgttaatttatttatttgcataaattgtactttttatttgtcaggttattcttctagaatcacgggaaagacttggtggccgaattcacactgactactcatttggctttcctgttgacctgggtgcatcgtggtaaagcttactctctttgttctcctttttttcttcatgttgacaagaaggttacatttctccatgttttagtattaaaaatggatgactgtgattcaggctgcatggagtttgcaaggagaatccactggccccattgattgggaagctgggactacctctttaccgtactagtgaggataattctgtcctttatgaccatgatttggaaaggtaaaagtatctctttttttataataaatgatattagttatctatttctgctgtacttccataattaattggtgacagtagtgtatgcttcaatttatcctttgcttatactgaatggtatatattatcagatacaagttttttcttatagaaattcatcaacttcttgcagctatgcactttttgatatggatgggaatcaagttccccaagagttagtaacaaaaattggtaaaatatttggagtgattttagaagaggcaagtaatttaatatttctagttatttggtttatctgattgattactcgcttattaatacattgttttttctgattgattctattaatgttcaactccacttattatgaacatcaccacctctaaagattgaccctgctttaatgcagacaaataatgtacgagaggaattcagtgaagatatgtccatactccgtgcactttcaattgtttttgaaagaaaaccggaattgaggtgattattggcataaaataatcctttgaccaccattattgattttcttagagctgaagtaatgtataatttaattttctctgttggatgcaggttggaaggcctttcccacaaggtgctacagtggtatttatgcagaatggagggctggtttgctacagatgctgataccatatcactgaaatgttgggatcaggtaatttgacaaaaccaagtttgagatgtttgggttctattatctatatatccatttcaagtttatgtcattgaaatttgaattgcatgacaaatcattaataggtagtactagtgggctgatgtgaatgggaactttttctttttcagctatttatcgttgttgtttttattcttgtatatacttataattgaatacaatgttactcgtaaagttgcaaactcatagttatgccctataggtttgagtttgagattaaatggtaatgtgtgccgccatattagatgcaaaggatgcaatatgagatagagaagtggcttcatatggtgatcatagtcacattatgttgctacgttattgttaattactacatgcatccatcaacatttttcgtgtatgacttattcttctctgtttatctgcatacaggaagtattactccctggtggtcacggtcttatggtcaggggttaccagcctgttataaataccctagccaagggtcttgatattcgcctgggacacaggtatatattagtttaaagtttggttttggaaatctgcgtcccccgttgtgttgcttaactaaatttaatggcattgataatacctcttctcagggtaacaaaaatagttaggcaatataatgaagtaaaggtgacagtggaaaatgggaaaacatttgttgcagacgctgctattgttgctgtacctcttggggtgctgaaggcatcttggataaaatttgagccaaagctaccagactggaaagaagctgccatttctgatattggggttgggattgagaataaaataattttacactttaaaaatgttttctggcctaatgtggaattcctaggagtagttgcagagacatcttatggatgcagctactttcttaatctccacaaggctacgggtcgtcctgtccttgtttacatgcctgctgggcagctggccaaagacattgagaaaatgtctgatgaagcagctgctaactttgctttcacacagctcaaaaagatccttccagacgcttcttcaccggtaaccatgataattttgatgatttatttcacttttttactatgcaagaaaagtaaatgcttcaatccatatttatatattgcagacccctaagttttactcagtttagttccggtgcatatattctttgacaattgctatatggttgaattgaataagttgtttttcagtgactagtatgttgttggtgttttgaagatgtaatttgtttcaatcatgcagattcagtatcttgtgtctcgatggggtatagatattaatacactaggttcctatagctatgatgcagttgggaaaccacatgacctgtatgagaggctacgggtccctgtagataatttattctttgcaggggaagcaacaagtatgttgtatacgggatctgtgcatggtgcatactctactggaatgatggcggctgaggactgcaggatgcgtgtcctggagcgttatggggagctagatttggtccagccggtaatgggagaggatgcttcagtgataccactccagatctctcgtttgtaatctcaggaggctttatgcatcccctttccgggtggcatccactgtcaaatgttgggttgaacttgagtagctgggaggtgctgtgactcctagagtatgaataatctcattaataacgcggaaatgcgtaatttggaatgacatgcactcacatttagttatagttgctaataatatggtaacgcattggtgttttctttgttgtttttaagctctaccgtatttaggacttattcattgaagaactttgcacaatcattgtaagttgaccggtaggacagtaggatatatacatggatgtatggttcgtgcctcaattcatccagaacagtatatttatcatacggaactcatcgatggtgtgaagtttgctgctcacaatgattggagttccattatcatcgaaagtgattgcaaaaaggtaggtgatattaatagaaatgtaacagattggtctgaactaggtattatttatgagggcataagattagcactgtcattgtttgatgaatgtattttccactttgttcctgggaaaggtactaaatttgcccacaagttgacaatgggcacaattctgggttgaaggtttggcttggtgtttaattcttggtgatatactgactctgtcgctgtttaatgaatttgatgtatatttgaaaaagaaagataattagagatagtaaaactaacataaaatgggtttaaggaatgtgtattttagtttaattcatgatcggatttagccaataatattgccattttatcatctaacttatctccgatttttaattcctttttcgggcatttcaatttgaatgcatggattaggttggtatggtaggctaatttaactaacattacaattcatttcactcattttatacggggcataagcagaaaggaattatttgtacattattttctcaaccatgcatttacatttcattctgcattaggcctaatacaagattaatccgcagctagaatgctttttaaaccatgcctgaaaaatataagataaaaggaatattagtaagtaataacattttctaatacatttttaacacatttttaatatatattttattggttaaaatttattgaaatttataaaatcgtaagacttattaaataaagtttgacatgcaaacttttataaatttgaatcaatttcagttaatgataatgaatagtttgtttaaaagagtacaagagtgtgttaaaaaaatgttacagtgtattactattatttcttaattcctcttatgcgttgatagccagttgatctatccaacgtctcattttctgctgctctcttgatgcgaccaatactaaataaataaataactttataaataaaaatgattttttattaaaatcatagtaaaatagtgttaagagcaaattaatttttcataaaaaatattactttttatttcttactttttatttttttaattagattagtgttaataacacattcttttaatatacttttaattattaattaaaatttattaaaaaatacaaaattatggttgatactcattacattaaaaagaaaactcataattttgtaaataattacgactaatgtgtatttggatccgcatttaacatgtctaattttgaggctaaaatgagtcaaataattttttcattgatcatgatgtttggtattatattagaaacatgaattataagttttagactcaagtctctttgaagttatgaaatgaggcctttttgtcaaaactaactagagttttgctatttgttcatgtatacagtatacccttgtcatgttatttgttacatgcatatccttagttagactcaagaaattttggtaattacgttccaaatcaattttgattacaaattttcaaataacattgtgtgtcaaattaattttctaatatctgttatcaaaacaaaaatcatattactgcaaagtcatgtttagttagaataaattgtataaacacatatccaaccacgcaataatatgtcaaatacttatgctggcagtgaaagttggttttcattattagattctcaaaattgcgaacaaaacataaaattaaacagggtgaagaaacccatcaacaacattcctttagtccaaaacaagattcctatgcagctaaaatgcatttcagccaagcctgaagaaaaaagacgaatgcctctaagtgtcagcaaccagttgatctaaggtgtcattttcagcggatttattgatgcgaacaacagctttttcaaccttcaaaggcattaagaattggttcaccacttcacatgtgacaaaaaattcatgtaatataacatgtataagatcttctgatgtagagttttgattacctctgcttgccaatttgttctggcagtcagaattattagagttactgtttgtataagaactccaaggatcattccccaccaaattccctaaaacaataccacaaaatgcattgcatgaaactaatcagttacaaacttaaaaattagtgacagagatgttccaaacttacagcaactcctagagaagttttgaagccaagaacacatccaacagtaagaccaacaacatagtaagaagccaagtttacataagccactactgcttgccatccacttccaattgccacccctgaaattttccaagaaaaattaacaaaagtgtgataaaccaaagttggtgcttatgctagtgtactttttatagctttattacctgataatataggttgaatgccatttaagaaaacagaaatagcaagcaagggagtcaaattagacacagcatcaatgacgtcagagtcagaagtgaaaagtttgctcaaagaaacccggaatatcaagataattgtgcagaaaaccacactaatgaggatgctggttccattcactacgaagacagaaaattttgctactcttggatgtgatgctcctaattcgttgctgactcggacactgcaatcatggaaactaccattagcatgcttttgagaaagttgtttgaatgaaaaacacattgttttgttgcaaacctggctgctgtactaaggcctaacataaattgcatatcccagttcaagtaattcatactgaaagcacattaggataaagatattatggttaggcaacatgttggcacataacaagaaaaattattccaagacaaaatattaacataccaaatggaaatggagtccagtgagattgtgggattggagagcagccctgataaaagcaccagtccctgattgtaccatacctccaaactacattaagatacatttttagattagtagaacaaattgatgtaaataataatgtggtgtgtgatgtgtatacttatgtagggtatgtttggatagaagttggaaaagtaattttgagatgcacatttgtgatttccaatgcacaaaatgaagaatgaaggttttaatgatttgggatcaaaagtacttttgagctcactcaattgaaatccaaataaatatgtactaaatagtaatgtacttactgtgtaagacgtttttacattatcatgcaattacaaaacttatataataatcagtacttaaaaagttatatctaaagtgatttctgattggtttaactgtgtttgacggcacaaagaaattaaactcatttatctaggcatgcatgtaaagaaaattatgaggacatcgacatatagtcataccataacatcacagcagaagctactgtgagcttgaaataaggccaaattcctttgaaagccttaacactgaagcctgtccaggtttccttgcatcttggactaaatttgatgtagagaccattaaacaagacaagaagccaccaagaaaagctgagagtaagggctgcccctaaaaggccatatcccaaaacatatataactagccaactgagaagaatgtgaacaaggaacaccccaactgacatatatgcaagaggattcacaatgttctgtgcttggaggaacctctgcattggacagcttattgcaaatgcatagagttgaagaataattccgcgtgcaaacacttggccttgctcggctatgctatctgactgtcctatggcctttagaaaatccccagagaaccaatagagaaatgagagaatcactgctgctccaatgtgtaagatgattgctctttgcaatatgatgctcattgctccatgcttttttgccccatatgcttgtccacacacagtttgcaccgcacttgccatccccagctatttaacaaaatgcaatcatcacaaatatgcacatgattgaaaatgagacacttctttaaatatattatatgttatttgattgaaatttattcaaaactacacagttataagtgaaactcgttaaataagaagagtcagttaaatagtaagtgcgacttgccaaattttataatttccaatcaaatttaactatgtgtagaaagaaaaaaaatgatctagatcaccaatgcagattactttagtgaaactttaatctgattagagaacaacaatacttatggaactgcattaaattttatctaaaagaaaaagaacaacacttaaagcacttatggaactgcattttaagttttatctaatagaaaatgtattcaaaagagtgtgttaagtggcgcagcagataaagatgcataccataataccataagctagaccctgaataccaacactggctacggatgctccagcaagctctagagaccccaaatgtccagtgaacatcaaggtcacaaaacttagcatataattgaaaatggacacaacaatagaagccccagagaggagccagagaagccttgactcccacacaacaagctttgaccaccatctcaatgcaataggcctatgttccaagaattcttcaatggcatctgatgacaagttttgaatgtgtgagtgtgcgtcaagcctgggtagcaaaggttggtgctccaaagagcccatggttattatgtgcactgcaatacaagtgtcacaactagtttcagtgcatggaatgaggcattccaaataaccaattatatatgcatgcatgtggacaagtggaatatttgctccaccgaagattatgtagctaaccttccaacatgttttgttggtacctttcagttgttttcacgtgcttcttgacatagagacaagtagataaaactaccttcagttattaacctttttttttatcagccttcagttattaatttattatagacatatcacatatggtatctatatattttgtacaaaaaaaaaatgtggttgctgacaataaaaattcaaatttttacacctttgaatgattagtaggctgtcacttgaaaaatatgcgaaccgcaaaaaatagtaaaaatgtttactgttcaaagtggggaaggaatgaccttcggtagtgtaaagcagctaaactaagtcttcaaccgactgttaagaaatgagaaaagtgaataacagcatcatacatttaaaaaaaaaaaaaaaacttttttttagtaaaatataaaagttttttacattattgtctaataaaaaatcattatctataataaatttgttaagttttaatatcatcatctgtattaaacacaggatactttttattgattgaggtcagaattgctgcacaagaagtgcaagcaacaatgctgcaaaaactttcaacataacaatatatttattaaattctttacaatttacagaatgttcagttaataataaataatgtgtaaaaattttattggtatttctcttttagcaagcatgtcatcattgttttcacgaattgtcacctttcgtcgacaatcaaccatcatcattttctccatgtgggttgtgtttaattggagtggcatataccgatatacggtcttgtctttttcatttaataggaaaaattgggtgtattataataatgcttgtgactccaacatgttaatagaatgtatgaatgttacctgagctgagtcattgcttgtgcatgtgtaagcattgttattaccaaaaacaaattaattgtgttaacactggctaacacatattacagaataaaaaaattgaattattttaacaagttaatattctttaaacttccaagatattaacttatgacatagtggtaaccaaaatatttttaattttttttctcaaataagacatattttccctcgtttatttcagataaaataaaaaatatatttatatttttcatgagtttaattttcgtgcatggtgttttgtgagagttaaaattttatactattaaccaataaaaaaaaatctatgtataacttttaaaataatttttataaaaaaattaacaaattgagcatatataacaattcattcatgattgaatgataatatataaaaaataaaaaaaattattatacaatatttaagttatttcgaaaaagttcaaagagatacaaaattttatataatttaaaaaatatttaatatttcatcaatcaacttgaattaatgtacaatacagttttcaaaatataagtaaatcttcaccataggattacatgtatatgaatattcactttctaagatgttacatgcacgatcaccgtgatattatcacatgattcatgattcgcatttcataagaaatagagaaaacatagaaaacttactcgtttagtaaattgatccctagtcatatactcatatatataattatttgtatagaatatctacattctatattaggaagttcttggtaaggtaaaataattaccaagtcgtgcatattacaaaaaattaagcttaatctcaaatcaagacttgaacataaatctacttctgcctaagaaataatgtttaaaattagagatggattcaaatcatactattataacgactatcgctatcatccatgtgtttcagtattccttccaattgtcgttgttgaattgactatttgatcttgtattccaattttgaatacttcattatattaggatgaaggtgaattttagggtggaccacttgataggaggtccattatggaccatgaatcctgaccattagattaaatttagtattgcagaccatctaacaccaaatcccccagcccctccaccaaccacaattcgccactgccaaaaacgatttctgacgactacattttttttctcgccactacactcactcactgacccccttcacccatgaaccgtttttgcatgttcataatgtagccttggtgcctttaatcttaaaaggaccaagcttttttaagtgtccccaaaatgcacagcacaatgcttgttcttgttattattataattttctaaaagaaaaacaaagtttatcaggcctagttgggaccgatctctctttgaagcaaaccaacaaaaaaaatgttttaaattggatctaattcattgtgtctcgttgggtcaatcgacctccacagctttttttaaaggacaatttcagcgagacggggttttctgaaacggtgggttcctctgtcagcgaagaagaaaagggggggaaaatgacacgtcgcaaccgaaaatttcctctggaggcgatgcatggtggtcgatgtcgagggatgattggaagtaattcaaatctggagaggatacaacatgctaacaaaaggatgctattaatcagattgacctgaccattaaattgagaatggagaagttgttctctcactctctcatactctctatctcaccacgtggcaaaataaatcatgggcgatgttggagacagcaaatagcggttgctgggtgtgggtgggggatttggtgggggatgacttacaatactaagattaatctaatggtcaagattgatggttcaaaatggacccccacctatgaaggtctaaaaccatgaaggggaatataacaataacgcttgcaaggggataacaagtttcactataaaatataataacaagaaatttacaagttgacagccaaaaaaaataaagtatgtacaaatttcagaagcacgacaacagcatacaagattacaagccatgttgaaggctctcaaaaagattgaatcaacgccatctattttttttttaaaaaaatgctcaatctacaaaacttctccaagagcgttgccaattaaatcaactggctcgggtatcctattttaattcatgtgaaagtaacaaaaaaaattacttactaaatacatcagatagcaatttctgttgatctttacccagcccagagaaccactttctcaaagtttcagcattgtcagaaacagatttagaatatgctgaaagatggattttagtatgaaaaagggtttcaaaatcaagaggaagaaggccaaacagagcagtggccgcagcaacttgaagagaaagacttgctttcatggaagaggttcggcaaaaataagtatacaaataacatctcaggtttccaactcctttatcttcatatccaccaacatctactccagtcctgaaatttataacgtcatttatgactttgttataacacaagcaaaaatatgtgaaagcatctttctttgttaaatcaaataatatttaaaagtctgcatgtgcccatggcactatggctttttcacagatatgtgatcaacaaagaaacagctgtacagtaaaagttaaagagaaaaatgaaactatcaccatacaaagattctgagcgtaggtgctaccaaaaaagcagaatgtgttgtgacataaattggatagatacccattagtagttaggtgtcccttagtgagggagttagttatgttatttgggcaggccgagacagtagaagaaataaggcatattgccaataaacaaagaggagagttgagagagaaattatctaatcatttgaaaaaggataacactctttagagagtggggatagtcctattctctcgatatccagggaaatcactcattttggtatttttttaaccctagcctaaggcttctaccacactagcccagcaattgggatttagaattcaataaaaaattaaaaatcattatttccttaagatgactctaaatactcatcttagtagtaagtgatttttaatcttgataagcatacatatatcctctatcgatacaaagttaccaacatatgtatatatcattatgcatgaatgtggtcatgatactagcaatatccaagaagcagtgatcaatttacctcccaagttgacctagaagaacaattatacgaacagcaaagttctcctctgcacatgagtcaagtatattcagaagctgaggaacaagtttcatatcagcccagtgccagctctgtattaggaaaaggaaacatgcaatcaggtttgattatgatgacatcaacaaaataaagtgacaagttattccacgagtatgagaagttgagaacagtataactctcaaccataaaaaaacttgggccttggcaacaaatcacttatttcagtaaatgatggtgaataccacgagtgaaatcactttcaagaactataccatggccaatttcatattgtaaaattctattaatttcagtatggcatcaattctaaaaaaagataatgtcacttattttaggagaactactctttaattttagaacttgataaaaagaaattatagaacagggtcaatattaacttgaaataatgagaataataccgttttgtttgcaaccagttccaccaatgacaggacgtcattcaggcgacaaaagttgacattcataagggcatctggttgagtagcagaaatcgagccttttttcaaacagggcacatcacagttcttgctaatggcacattgaactgcatcctgattataccattgtccagcattataattgtctgacattaatctggaatctgacaaatttattcgctttatctcttccaagagcaaacatgcaactgcatcaatggattcagcaccttccgagaatgggcatttaacattcatacacaactcagcatgcagctgatttattgaaggaagacaagcagatgcaacagatgggctctcatcctcaagaaacataattagagatttcaaaacagtcaccattaatccaaaattatccatgttaaaaaacttctctccacccagataagcaaaaatatggagaatagtcagcaccatcagagaatcccacttgcatgaccgaagaatatgatatgaagcatcacaaataaatccaacatgatcagttgcagcacatactgatgctaatataatacttgctgctgccaattgttcacttgaagctacatcggatgatacttcattaacacaatccagaaaatcattggctctcaaatcacaagacaaagtttcagcatctactctactgtttactattacttttccctcaataagaaaatcttcaatgaggctaagcagctcgtgcaaagaataattctctacaaacaggattcttgtctctgcaacagacataactggggaaaaagatgtgaaattttgtcaaattaaaatcaaatttaaataacatgatattaatattactatataattaaaaacattcttttaatgttccgaaaatggaagttgattatgaaacaaattaccaaacctgtgcaaatatgttcagaataagattgcaagcagtggaataaattcccatcccaaagttttccaaatgtctttgttgcagtcatggcaaagttgaacagcataagtgttaacagcaccgaaaccttctccctgaaagaaattagaagaaacaaaataataaaattaatatcaacaccaccatttgtccacagttaaatattatcatgaactgatttgtttgttattacaagaaaagcaaaatattgaaacaaaaactataaagggtgctcaacagcattgaccctatactatcacaaaatgtgagacacttacttttgtgagagtttttcttccattttaagtacagtcagaatgttactaaccccccagcctgtttgagtagccaaattgcaccgagctatacaattttttgtagcaacaagtatcgtagatatgatactattgtcctcaatatttgaaaagacaacacaaaattcaggaagttgattgtttaaagatccaattccatcctccaccgaaaaagcagtccttgacttttctgtagagtgcatatgaaaattacaagaaactccataatcatcacatttttgttcattagaattgatttcaacattaattacatcaaggtaaggtgaagtaaacaggtctgttcttgagctcaacatgtcatcttggagtacttcctctagagaggtattcgtcaaattaccctcttcaaatgtttcacgaaattcaatttcaggaagagatggagaaatgggaaaatccattgcttttctatagcattcctcactggtagcatcttctaattctaataatttcatataatttccatcaggcacagtatcaaaattaactatcgaattgaaattattcacagcatcacatatcctattcccatatgcttgagaggtttctaaagtatgtggagcagggcaggaagtgtgtctacagacatttgcatcatcatagacctcagtgtcagcctcttctgtgcccttttgctcatccctgttaaccaaaggtatcatgtccactttttccctatgatatttctttctctttttgtgggcccttttattctcttcctgtaaattattcagattatgaagcacctcttttcctccgtctaagcatttgacaacttttctatgcatcaaaccatgcaaatcagagagtttctcagaagacaaatttgcattatattcaactgtgtcctgcgttcttttcctcttcctgtggtgcacatcaacagatttgtcagatggcttgaagtcctgagtcaattttgctgatgcagtaactgggaaaatggttgcatcctgtgagcccatcaactgtccatcagaaaaagattctgtactggaatttactgcagaactctgtaactttgttctgtcagatcctctaacaagaggctccaatttagaaccaatacctgtgatagatttttcagagtaatttctacctggactgaggagttgagtgttcttcatgttttccctcaatggatcacttgcctcaattgttgtgcagcagggttccagaagctcattctcaaattggccacgtgtctcagataaatttagattgcaaatttgtctcatgacatttgaattctgcatatctagtgtattctcaaactgcaaaccaatcattcaacaaagattaaaaaaaaatagttaagttgtgcatacacaagaataacatacaataaaagagaaacaaaaaaaataaattgaaaaatatatttaattatatgaactctgacctaaaaccaaggcctctcgtaaacaaaaaaaatctttaattccttcctctctcccacccccaaaaagataaaactaaaaccaagtactatctataactactaaacaattatttagtgctgatatataataaaaccacccaaataatttatgtattgctttcaggggatcctgaaaattctcatttcccaaggttaaataaactgttagtgctacagctaatatgatgataaacccaaatattgcaataatttaggggacaaccaaccaacaagttcataaccacttgtccataacataagtagtctcacttttaatctgcatatgagagtaagccagaatgagatcattggcttcaaaagtgtgcatgatttcaacagggagaggagataaaaaatgacaaaaatactcaaacattatataactacaaacaatgtcagtgaaaccaacctttgtttggccatgcatacttccaacgacaggtgaaaaggatgcatccagtatatcaaggcgttgtagaaattgaatgaaatccatctttagacgacctaaatcgtgacgtaaaataccataacgacttgcttctaacttatatttttgcctggtatgttttgctcttagcttttcaaacttaagtttgttttttaaaagcttcacttctgtactttcagcattgaccttgctgtcagcagccattgcaacaggttttgtcaaggacgagagttcatggatcttccgtttcaaatcctcaatcttctgcttatcctcttctaactgctgagacatctgatcagcaagacatttttctgtcatgaacttgttccagttatcctcagcaagtgccttctgctcctttaatttaaccatctctgcatctgcacgccttttttcctcatcgaccttttgtttttcaacctctaacctttcatttgcttttgccatccctgactcagcatttattttctctgctaatagtttgcgcttttcagcttcaaactttttggttgcctctctatacgtagaaatctcatacgccaactttgtttttgcttcgtttacctgtttctccaattgaccaatttgaaaactatacttcactgccttctccgcttcaattctggcaatctccccctttacagcagcctttttcttctcttcttctagtgacttggaagcttcagcagctttcttcctctcagagtcaacccttcttttcctctcctctataagccccttcaatctaccaatttccttttccttttcagcgacctttttcttctcttctccaagtaacttgcaaacatcagtgtcttccttcccctcagaatcatcctttctcttctccacctctataagctccttcaatctactcatttccttctccttttccgcagccttattcttctcatcccctaccatcttgcaagcttcagcagctttcttgctctcagaatcagcccttctcttctctgcctctataagcctcttcaatccaccgatttccttttccttttcaacaaccttattcttctctttctctagtaacttgcaagcttcagcagccttcttcctctcagaatcagcccttcccttctcgacttctataagcctcttcaatccaccgacttccttttccttttcaacaaccttattcttctcgttctctagtaacttacaagcttcagcagccttcttcctctcagaatcagcccttcccttctccacttctataagctccttcaatctaccaatttccttttcccactcagcttgtaaggtcccattctcatttccaccatcgccacgtccaagctgtgttatgggagtaccaatctgagactccaagctgcaagtttcactctctaaatgtgccctagcagcaacaaattctcccaatttttcctctctttccactttgaccccacatactgcagagaataacatcaaatcaatgacattactagcatattcattattcactcaactaaaccaattgcatacgcatactgcgaacataaccaaatattcattatataataccccaaaacttaaaaaaaaaaaaaataaagagttagttacctttgttgtagcgggactggatttcgttaattttttgttcaagaaccttgacggcttgtcgcagagcattccgcgattcttgggtcttcaagtatttcttcttccactgcgtatgagaaataagagaaagagaacacattaatgattaaaatcaaaaagtgaagtggaaaaagagaatgaaagtgagtgaaagagagagaggttttttacgagttcacagcaggggtttgtggagtcagatttgggagtctgacctcgattcgttgacaatgccatgttattcgcaatgcagtgaatgagtaacagattcgcttcacgagatggaagaagagtcagtgacgaccgtaacggagtaaaccctaaaccccatagcaacagaacagaaggcagcgccacttcattgttgaattcgaaacgaaggtttgaattccctcaccatactgtgatttttgggttacaatttttaaaaaaaaataacatatttagtcctttatctttttatagtttgatcctttatcctaaaaatatttagtgtgttttttatcataatattagttaattaacatgctagatatgtcttttaggatttatttaattaaattattgtgactgagtaaataaaatcactataatttatgatgatgagattatattgaccgttcgaaatttgtattgattatattaattaagctttgtaagagttaatataacaataacagtcaaaatactatattaaattgaaagaaattaaaaaaaatagaaaaaatattcattaatttgagtggattgaaaatggttaaaaacttatttaatccagatttttttataaaacttatctaattgattgtttataagacattaaatatattagaagtcaaatcaaatttataaagtttaatttagtgtagcatcatgcttcacaggttatggtaaatgaagattttagatgacgatttgaaaatgttgataaaataaatgtttggaataatcatggattgagagatatggaccatttttttaatttcaaattccgttgaaggtttggaacactttcttgttagtgatttcattgatgagacgaaggctactgcacttctccttattcttaagtggattgattttatgaagtcactaaatgtgattattgaattagattacaaacaattagttgatgctctatctcataacaatcttaaatttggttctgttgtgacaatttgtataaacttacttagtatatgtcaaaacgtcatggtttattttatcaagagacaagtcaaccaattcgcttttgtaagggtgtctaagtttcatgcaatccccaaaattttgattatttaccatcttatattgattttattattataagtggaatgccataagcctctttttcggtaaaaaaaaaaaagtacaattgaaattttttaatataaatttatcatagcattcattaattaacatattagatatatctcctaacatttatttaattaaattgttgtgcataaataaaaaaaaatcatattaaattgattatttcatatttgtattgattatattaattaagatttgaaaaagttataacaattaatatacatttgaatacatattaattgtgcaattttgtctaattctccatggatattttcctgttggaaaataaaaacaaatgtaaaaatagaaaaaaggaggaaaaaaatatatgtgcattgattaaaaaaaattgtttgatttgactaaaaatttgatagttattgtattttattaatatagtcgagtgaatcaaaatattgaatggtgcattcatagctaacaattttaccatttcaattcaaagaaacctatttaatgcatttatcaacaaaattgaattataattgaattttttttatacggactttttttataatgggagaaatgtgaatcaaagatgagtacttatatattacccaaacccttcatctgaggctgacattagtagattcttttttatactaccatttaattataatttttatgtattgtaagattgttagttttattgaatcttttgcatgtcaaatgaaattttataaatatgtttgtttttttgttttgctagagataatatgtatcttttaactgaaatgatattgtccaaggaggataggataattataaaaagtcacaaatttttccttcaagtatttaagacaaactcaaactcaagaccataattaagatagaacaattatatgtcaattgatccatttgttaggtggtttatgaatgattcttttggatcatcatattacaaatacgaagtattcattggcttaattagtgactgattttcccttaaaaacttgactttgactagacacttttagtgatcttttccctttatcacatttttttccaataaaaacatgaagaccatacacaatccccaaataaataaataaaaattccacaaatcaacaaccttttcttctctgtcactcccaatttcacaatgcttacattgagcatggactcaatttgcaactcctccttagttctaatttctttttctgctttttgtcttcttcaaccacattctttcccttccctgaacttcacgaggactctactatcgcttattggtcaaagaaaaaataaatcaaaagattttgttgtttgtgtagtacatatatattatcattttgccgtaacctaaacaataaaatattttgattcgttttttctttgaccgtgggaagagttattaaaaaaaaaaaaaaaaaaaaaaaaaccaacggcggagcctttgtcaagttcaggaaaaggatagaacgttggttaaagaggacaacaaagcaggaaaaaaaaaatagaattaaggaggagcatcaacttgagttcattttcagtgtagacatagagaaattgggagtggcaaagaagaaaggagaaagggttgttgatttggggataatgttggatctttgtgatttgtgattgtgaaaaccaggaggaagcaatttctttattgaatctgtttgatacttgtttaaaagctttatcaagcacttttttatgatttttaaccgctataaaattaggcgccacaaaatgtaataaaatatcaattaaattaatgccatatcatcattaatgactaaacaaatcataactgactctgagaaagggtaaaatttatttgttaaacatgaaatacttgtgtgtaaagataaaagcaacgagtttttttttttaaagagatactgacagacagaagagataaggagacacagaagagctcacaaatcactgagttcacagcaacccttctctttgttttatgtcatggtgctaacctttatatcggagtaaaatcaaactaattattgatatagtggtgtggtatattacaacgaagtccatgttctgcattgtggaatgctgtctttgactctgttttactcaaatttcctattttctagtaacaccctctcttcatcattggttggtgccccattattccacaaagcaagatctccaaacaactcacctaccacagttttccttgcaaattcaagcccacctacaccagtcatgaaacctccagatacaccaaccattatcacagttccttccgccaattctgtcaatttcccccaccagttcatctgacagttccttctatcacaccagttcccttggccgttgtaattcaagccatttcaggggaacaaccaatcaccaaccctgtgatttcttattcaccccaaccaggaattgttcctacaataaaaaacaccaaagctcaaaccaattgcaacataagcacaagctacaaatacagaaaaaaaaaaaaaaaaaaaaaaagctaaaaccaaagccaccattatgtctaaaagctcagtttcacaatcatatcaatccaaccaagtaaccagagaaggagataaataaattgaatcagaataatcaaaggacaaacaacaaacatgtcatagtttttttttaaaaaaaataatcatatcaatcaatctgaggggagacagttcgacatggcaaggcaatagttggttacctattaacgagcagtggaaccagccacacctatctttctctctacggatatatatacatatttatgcttcagctacagaaaacattgaccagtttgatgatataactcaaaatagtctttccccattctgcacttgtgtaaactccaaagtccaaccagcaataacaatccacaaatcttaaaaacaatttacaatgttggagtcccaatttcccatgagcatagcaaatggaccaaaattcttagccaacattagctcataatcagaatgccaacagacaaatcaaacaagatcaagactggaaagaataagttggcttcaaggaaaaaaaactcaaaattccaccataaaatccttagaaattcttgctccccgtggtatttttttcacaagataatttatcagtatcaaccaagtgactgcattaggaatgaacccattatctatgcctttatataaaagcaggcacgcatcattaaacataccctcatgacagtgcctactgatcagtgtgttatatgaaatagcatcaggacgaattccttcactctgtaacctgttaaaaaggtttgctgcctcttgaacatgacccatcttgcaaagaccattgatcaggctgttataagtgactatatctggagtcaaaccacgatgaatcatatcccgaagaaattttagagcgtcatttactttcccaattctacacaagccactgatcagtatattgcaagagacaatagtaggaaaaacccctttcccaagcatttcttcaaacaatcccaatcctttttcaactgccccagttttacagagagctttgataaggccattatatgtaatattgtcgagaggacaccctctaaatatcatttcatcaacaagcttaaatgcttgttgaactgaatctctcataagaaatgcatgaaccaacgtgttgtatgttacagtgttggcaataacaccctccaagaacatgtcatgatataaactcaaggcctcttccatcttatcattcttgcaaagtccatttattaaagaattaaatgtataaatgtcaggtttacatcctttgcttgacatttcaccaaacatctgtaaagcttcttcaatcttcccgtccttgcacagtgcacaaatcaagcaattgtaccctactgtattcagactcagaccctttgctgacatgctattcacaatatcagcagcttcctctaatcgtccttgcttgcagaaaccatttatcaatattgtgtatgtgatcacatttggctcaaagccttttgctaccatatcatagaagaattcaagagcagagaccaaatgccctttcttgactagtccatccatcattatgttaaacgtgtaggcatcaggctcgtaacctgcaattaccatgttattgtacagaagatccttggcttcttcaaaccttccactagcaacataaccactaattaatgtattatatagcacagtattggggttgggaattttgttcagcaacgcccttgcttcatcaacttgccccattctgcacaacccatgcattaaatatccatacgttaaagcatcagtgctgaaacctcgaagtagcattcgatcaagcaactttgctgcctcgtgaatccgaccagccctgcagaggccatggatgacatcattgaaggtctgaacatcaggctcacagcacatcagaaacatgtcctccaaaagccgaatcgattcactcactctgttgttttcacaaagagcatggatcaggttctggtaaatgaccgaattcggaacacacccgtgcttcaccatgtccttgagaagtgagcaagccgaatcaacctcattaaccatacacaaggctttcatgaccaccccaaacgtgtacacagttggagaaacacctctattcaacatgtcatagaaaacattaggtgccaccctggggcaatctccgtcaactagaatatccaacacaacattgtaggacttaaatgtgggatcacaggaataaacaccccacatgtccaacaaaagcctagttgcttggccaggcaatccagccttcccataatacttcataatcaatataaagagtgattctttaaaaacaactccttcatctttcatttgcttcaacaacttttctataattttgaagtccccaacagccccaagcttatcaattaagagatagtatgcatcaaaggtgtgacaataccccttttgggcaccagccctttgaaacaattccatggaagtgggaatgtcaagagggagctccaacaatttacaaagctggaatgggctaattggggtgagtgatcttctaagctgtttgaggtcaaagggtttgagcaatctctcccactctgtctctgtgtcactactactctcaggttcattgttatcattgaaattggtaccagtggcagtggtggaaagcgggaaagaagggattttgaagcaaactagcttggttctattgacatggattgaggattttaatgttttcaacatgaaggtgagagaaactaaccccaatggagccaccgcgacgtgggtcgcaataaacgaagaaacagatgctacagtgcaccctccttgttgtcaatgaaaaatgaaacacacatgtccaaagtccaaccgcgttttttgttacgatgagaggagggaggcgatgtgggttaggttccacgtttaaacgcagactacgagcgtccaaacttgaaacttcaaagaggaagctatcggcaccgttagtttttttttttttttttttatagtaactcacgcatttgttgaattaagttagattcttcacaggttttagtttttttttcttatgcaatgaataaatagttttaaatatatgaattatattttaacatcatctgaaataaataaattgtattttaaatttagataaatatttaatattttaatataaaattatttgtaactatttgatattttaaagaaaaaaactattaaactcaatttaaaaataaagataaaaaagtagttaaaaaaatcaaatatatttgtatacagataaagagggagtgacttgaaagtggttaacaaaatcaattacatagattaaagatgatttgagatggttgagaaagaaataagttgggctaattattaaataaaattaattttaaaactaaaattaacaaataaatttgaaaaaaataaaaaataattagaattataaatcatggaataaaaaaaaactataaatgttccatttttaacatggaacatttataattatgttgttcagtttagcgaatcaaatatttaacttcaaaagaaaaagtgaatgaatagaggttgtaaaaataatttagcactatttgaataaacctttttttcgactgaaagaaaattgaaaaaactttttaagcacctataaaagagggggaaaaaaacttctttcatactagtattttcataagtttttttgttttttttaaacgaaaaactgtacgcaagttaaattaacttttttaaagtattaacctatgcttgaagccttgaactgcagaaaccttatatttgacaactccaaaaaaaccatttgaaatattctttattacaatatatattgcttaaatgaaactatttttcatcagaaacatttcatttgtcgattttgaaactcaatttcacgaaaagttgtcagtagggaccgtttgtcaaatatgatggaaaattggtgcgtacgtataaaagaaaatggaacaacaacgaagctcccaaatttttgattgcaaaactaaataagagatacagtaataattaataactgctataagcaactaatcattacagaaacaaggtcacctattataatttacagtcatttgctgttgatctatttagaccttgcaaaatcactacatgtcaaccattaatgtgtataagaatgctgggccaatccatacataagaaaacttgtaacataaaattctgccaccataatttttcaactaatattccttacatgggagagtgtcctagtagtgaaaagatcccattgatgccatgccatttctcgaacttctcaactcttgttgactcacataattatcacaagagttggcaggagtagaaagtttgttacctggggcagaagtagaaggactaagacctttgcccatttgttgcacttctagtggagatagtatttttatgtaccacacattgttcacaaactccctgcaaaattatcaaatgtaaatatttctgtgcagaatcaggaaagtcttaaaatgatgtgcttcttggctatatattcattttttagtcaagcatcgttcttctagccttttactacttgggatgacatgcgcaagtaattaaatactcttctgcatggactatgatttcagtaatctcaaagcaatgaacctatactcaaagttagtgagcaaaaacttaatagaaggaacaagaaaaatggtacaaataattattcagacccataaaaaaaaaaattgtgaaatgtcgacatgttcaaattatcaaatatgtaagaaacattactgactattcctatagcatcaatgacattagcaacaatgaaggatgtagcaaatcccaagataatatattataacttggaacataaataacagctggcatatggcaacttactgccaaggatcatcaccaagaagaagaacatcattctcccggtcaacaaatacaagctgccagcctgatctctgagtcttagggtcttctagttggccttcaaggctgaacatgcgagcaagctcactaatgagctcatcatagctgctgaacttggaaatgtccagtgacctgccaaaggaccctgacttgtgaacctgtcaaaattacaccacatccatcaccatataaaattagagtaatagtaatagtcctagacagtagacaacatccacttactaattggagaaaatagtagtcctacaaaaaagaggaaacaaaactaaaaagtagctgcaatatgctgtttatataaaaatagggtcccaaatatccccgtacaatagaaccaattcaacattaaagataaatatattatataaatatatttaacttgtaccttgaacctattctttaactaataaactgttgcttaattttggtaaatgatattcaaaagtggctccgcataaaatatataaataaaggcatactacctataaacaaaaggcattagctattaccttaacaaaggttccagttggtgtatttgcttggtctacattttcagaagactgcaagaaacctgattcatccacacaactcgaagttgtcatgtttgaacttaaggggaaatcagtgactgaagcaccaccacaatttgaagcagaaaatggcaacgataatgaatcgttcacattgcctatatttctcaggtttgacatgccattttgcagcataagagaagaggggtcaatgttaatcccaaataaaagattgctctgaggatcagcagcagcatggtatgcagaatgttctcttccaggaaatggaagcaaagcagcaagttcagacacatttgattgtgatgttcccaagttttccacctgaggcaatacgcactgagaagcagcagatggaagctgaggaggttcagcggttatttgcttgggtagcatggctgcagaagacataacggaattggatccactcaagttaagtaactgggatgttccatcctgggagaatgaccctagtagactctggataggggaaacatcagaaccagaaatatgattcctcataggttcaggaaagctctgctgctggcaatgtgaagctagggcttgcatgggaggagattgagactgggtacctgatgcaaaattggacaaaggagagatgacatttggtaactgctgaacaggcaagtttttaatttgctgctgctgttgccgctgatcactgtaagggtggtaacgatgcaactgttgttgcagaagttgtgactgagcaggcacctggttttcttgaaaattgtgtagaagggtgttttgaggctgagcctgtggtaatacttgcctctgtacctcagaagcatgagcactgggaacatttgaagtcattgcttggtataactctggttggagacctggtatagaagcatcaagtctaggttgcatccatggtgtaacaccaagcccctggaagtttaaagattgcattccttgatccccaagcccaccttggagccacatgaatggagaaccaatgcccatgtctccatccttgagacctgacttacacaaaaggaaggaagaaatatattaaggtgaagatgtcatgtacttcacgacaaaaaataaaacaagcatattgtcacagatcccatagaatgccatgacatgatgacacttaacaaaaccacccataccatataaagaaggtaagcccgatggccaagggcgcctcaaccttaaggggaatggagatggatacattgggaatgttgtcaaaggttcaatctcccacaaggaaactcttggctgcctctcccctgcagtggactcatcccagccaacctacacccatagacaaaagttaaaaaaccaaattatacatcatctcatttatctgtaaacacaatctctgatatttcaataatattgctaaattctatcatgacaatgccatatagttgctatatgaatcaaacagtcataacaaaccttcacagaacgccagtgtgaatttggccagcggactggatctaaatcactaataccagttatggtacccatgtatctggacaagaacatgttacagtgagtataggttcaaatgtttaaaaaaaaaaaagaagaaaaaggggggaaaaaaaaaaaaaaaaaacttagaacagaccactgttctaaaggacaagcaaatattgtcgtggctaaacatccaaagcttttatcttttggaaggatacaagcatatattgtcatggctaatcagtcacaaaaattttggctttttatcttttggaagcacataagtaatgcatcaacagtcatgaaaaggagtgcacagcagagagtggcattaaatggcatacagaaaaattattaatacaataataatggttagaaaccaacaaatcagtaacataaaatggcaggaaccaaaattgaggaaagctaaagggaaacaagattgacttgctactgacacaactgttgaagtcacagtcacacagagataaagatttaaaggggtccaactaatactttcactgttcaagttgggatggaatcatgtgcagttacccgcattgctgattgggaattgcagtgttctgtgaatagcagcatatttgtttctttattgatatgacacagaacactgcacacccaacccaaagtactatgtggttatcaccacacattcattgataaaccacattaaaagaggaacataaataaatttggaaagtaaaattaaaggttaaatttgtaaccaaaaaaaaaaaaaagttaaattacttcataggtctcttatacttttttttgagagagaactcagttatccctatagtttgaattagcaactgggttggattccaatagtttccaaaaaaaaaaaattaagagtcctcgaatccaccctaccattagagggtcataggggactatttacaaaaaggaaactttaaaatttcaaaccatcaaagaccattttgaattttttcaaaaagtatgggtacctaagaagtaatttaaccaaatcaactgtctctctaagtcatcagacaaaagtataaagtaaacactaagattcacatgggagaagaattttttgtcctccttgagtttcttcttcgagcagggcccaaaatagtaacaagagaaaggaaaatttaagacaataaatacctaccgacgaacacttgattcttctgtctcaaagagcatcctaaatcgcatgccaacagaaactcgtgtatgatacacagctttaacgtacttggccaaaggaatgacaaattcagatgggcttgccctataaaattagaagggggagggggagcatgttcagtgtgatttgtagggtgataattctcatcattagcattagcattgaagttacacacctaggattatagaatatagtaaagcggctgtttgtggcagctgcatgagctgcagcagcaagaagaccaatgtgcatgctatcacttgacagaaccgatgatggcatgatagtctgcggacgattcgcccgccgtatgcccaagagtaactggtttttttcattcctaataaaaagaacaagaagaattacaataatatcttatagttcctttgaatagatttcaatcatgcacccgtggcctatatagatgcaattactgacgatatttctatacgggcagggtaacaagctaaaacatatttatcaggtcaaaaagctcccacagatacattattttgaaataatgtgaactaatataaatataacatgacttctagtctaaagccctcttgtaattttctttctgcttaaatatatccataataaatatatctataactaaaactgtgttcaaagatagagggaggcaaaaggagttgaatctccaataggtcaatttaatggaaatatcaaaaattacatgtaccagatgaaaaggactgaatcaccagcaacaagcctcttcgcactgacaaagacactccaccctgtagtaagaagatgccttttgggctgacctgaaagtgaaaatatgaagcagttagaagtgaaaatataaagcagttagaagtgaaaacatttaagtaacaatttaagcagctttttcatgacaccacatatcacgactgttgcttgctaatcattccttggtttcactatcgacaatttatcaaacttgatatggaaaaggatcttcaggaggaaaggaagagccaaagataagatgtatatgattaaggactatacactcaacaatataatgatccttaacacagctctcatactgttcatgcaaaacaaaaattagattggccaaggttgactaaaaattaaaaattacaacagtaatgctatttaaaatgtagtatgagtaaagaaaatgaccaaggttgactaaagttttaacacaagaaaagaaaatggccaaacaaagtaagccaagcagcgaatcaaataaggatgaaatgagtctgcaataagacagaagtaaaatagtacatctactatagtcatatcatacgcaattaaattactccttagaaaactatgtcctgcttcaaatgctactacaattttaatgttttgaatgataaaaaggaagatcccagatataagtttatagaatatcatcagatgtgcttttctttacaagaaattgagtgcgacagcataaactggacataaagaagcagatgcaaggaccacaaataattttataccaaaaatttaaaaaaaaaaaaaaaaaaaaaaactaaccacgaaatatatgcctgaatttccattcattatcatgaagatctctggcaattagttcttgagcaggaggctgctgtgagtaatcctgagaaacaaattaaagaaacacgtcagtcagatcaagagctgacaaactaattactgtgaaccaaatataacagataaatgacttacaagaggagggaagactttttcagctgctcttcgaggaacagaaaatcctccatgagtgctggtatcacttgcagttaatgttttgcagaagtagttggttggttgcttgctgggagtacccaactctgcaggcagcagatagacctccttttgctcttgctacaaaataaataatgtcaagacatgctataaaaaaaaatacaaaaaaaaaatagaaaaaggtagcaaataagagaaaagtactggacttagaggttgcagagtcatttgagcatatacttcatctgtttcagcatctgcctgcaaggtgcatgcttaaaaggttcagagtgcaagcccataaaaatgttttctgaaattctcaactattaattttattcttacatgcattgtcacattgtgaagctgacagataagttgtggtggcaagttagggtaattaggaatatgtgcatctacttccctgttggttgatgcagcaacctgtaacataaacatcaacatctatcaaataactgaagaaccaaatataaatgaaatatatgaaaagcaatcagttatttagaaatttcaaatgcaacaacaatagattagaaaagacaaccatttggcttgaaccccctcccctgccctggggaaaaaaattgaaactgaaaataaccataatgatgcaataaagagttctctatctgtcagtcactcatttttagcatagtaattatagataagatttatactgtgataatcagactgatcaaagctcggactattctagaactgaaaccttaatgccacaatttctatttaaaatttaacaaaatgctgctcatttcaagaatgaagcaatgtcatatctgctactagggacttcacttatgagctagaatgttagcaacaacaacagaaagcctaaatcaaacgtttattggagcatattttattttctcttcactcaattagcccatcctccctccctccaggcacaacaacttaaacactaatccatgaagtctgctaacatgtaacttacagcttacatctccatactttcacagtacagcagacaattgtaaatcccagtcctatcagttcaaataccaaatcaatcttatcttaaaactatgagcttgcactagcccaagcatgactgatttcaccatacacataaaagaaacaataagttgaagtctactccactaacttcggcagacagatcaaaatattacaactgtcctgctcaccgtgatcatatagatatactaaatgagcttctaattttctatacgactttatgtacttttcatgagcatagcaacttcaccaaatatccatgaaatgtgaaaaattcaagcatagtgcaataaatccaacttataggatacaagaagcattacttacctgctcactatgaccttggggaaagtacactacacgacttccaaccagaggcagagaaaccagagggccagcacaagcatgccaaagttcagaattcaaacattttttctcccctacacaatcacaggctaatatgaataaacatgaagtaaatcatttcacacaagtcaaaagggcaccacgccttagcccagtctacaagtggcatatcagtaataaactcattaaatccactgcatattttaccaataaaaaaaaaaaaaacataccacaatccgaaatccaatcacacaaacaaacaggcaaacagaataaccacacataaatagtaacacgcaatacaaccttgtcacataagaagttgaaacaaatcaaacacaaatcaaatccacatgacactaagaagttgaccctgacataaatacatattaaaacaaacaaaaacaaactatggcaacttgttcaacctcactccatgccatataataatgccaaaccaacgcctacaagttaaagtactactagagtatccttaacccctacctccaaacccatgcaaagacaaaaagaactaccaacacaaaaaacacaactaaaccaacaaaccaaggaaaagacaagagataagaaactttcaaaaagtgggagcagggcaagcagcaaaatacaaagcaatttgcacaaaatgaaagaatcaaataagctacttccactgctaccttcttcttcagcaggtgggttaaatccagaagaagagagcttcatgcttggagctataacaataggtaaggttccaaactagtaaaaactgaagcaccccaagtcgaataaaagcattattattgttataaaggtcgcaaattttgcatgcccctttgaatcagaaatgatcctatttcataacccaccccaccccccaccccaccccgaaaattgaagctacccacagaaaaccatcatccaaagccacttccaatgcaacacccttaatctcctggttctcataacacgctcgaatccaaccctaattgggagcctgaagttcaaaccctagcttcccagatctcaccgtagcggagctgaacagtggaattagagggattgggggagagaggcgagtgaagtgagagtgacattcatgtgggatttcagtggaagaagcggagaatgtgatgggagagagagaggagatagatatggctaatggctatgttactcaacaacaataatgcacagtgactggtaataattgatccatggcatggtatgtgttgtgctattatacgaaacgataacgacgaagaaaaatacggaacgtttctacgctttttcgtagatagatactcattggatactatggttttggtctcgaacccaaagacttgccaagtttggtctgttccaatgggaaacaatcgtattcgcataatcattatagacaacaaaaaaatctccctatagatgtttaacatagttgttgcattttaagactctaattcgataattaagtgtttattgagagtaattcagtctttggtgattgtcaacacctacttttaaaaacgagcaaatattaaaataaaaaataatagataaaaaaatatttataacagacttttttatttctaatacactaaaaaattgtgaaaaaaagtgtgtaaaagcattttgaacgtgcttgaatattaaatgaaacaagataactgttggctgggagtgggtaaatatatattaattataataaaaactcaaaaaattaaattctatttatatttcttcaattatttatattttatttattttaatttatattttatttttcttcaattattaatatttttttatttatatttataaaaattgaaaaatattaaattttattaaaaatataaatacgtggatttttttaaatttcttataattttttgtattagaggaaaatatcggatgagttctttaaaaagtgatatgacactataagaatcacaaaaaatactacgaaaatcacaaaaaaattgtttaagaaatgcaattggatatctcccaatgttctaataaaataataaggttcaattttgcaagtttaagttttcaccctgtaggtttttcttggcttcgattagatcactcctccacctatatctttttcaaaataaattctttctaacacacattttcggacaaaaccaatgaatgacattatgataaccctttacacacacatatatatatatatatcctttttagctgacaaaaaaatgataaagctaagagcacaaaataaaaataaaaggtctataaaagatgaaatatgcaaaaataaatttgaactaaattaatgttatttactttttttagttccactaactagttaattactaagttatcccttttttaagcaagaaattggttgctcaacagtatcttacattaatattcacacacatactttggctacatgtttacattttttataaattaaaaaatagtagatatgtatattaaaaaccatataatataaaaaattataaatcataaatttaatatttgtgtatgacacaagttattacactagtttaattaaaatgcaatgcatcaaactttttatagactttttttggctattagtttttatgataaaataaaaaggtcatatgttaacaaaaatatctaatatataatctaatttaaagtaataaaaggtctcattcccaaatttattttaagtcttattcattctttgataacaccgtttaaacaaatcacatcaataaaaataaataaaaatggacaacacattgatggagggacttaattggtacttgaaaaaatcgaggcccaaattgcacagttaaaagttagatatcaaaattgcacatttccgaaaattaaggaatcaaatgtgggattaagtttattttatattgtgaaaaatattttagattagatcatgtaatttttattctctcaaatagaggaaatttttccacattaaattttgatgtcttcttattttactttcccatttttttatggctatcattgttgaaattaactccgctagattattttttttagttaggttgccataagaaaaggagagtttttaagattttaatattttattgcgtgctagtataatcccatcatacgtatcatgagatgatagcttatttttgcatgatttcatttttaactaatttatttaggctggtgaatccttaatctcaagcattgaatacaacttattcattttaattaaacacaattaatctctatgacgaagatgtgtggataagaacaaatggaaatagtcattaatcattaaatgcttgttccacataaattcaacaaactattttattttttacaagaaaactacttgcaagcatccctcctttttaatgtactatttcctcctctgccatttgctcaagcaatgctacaattgaagtaaaaaaatatcaatgaaagtaaaataatgatgatgggtattaatatgtgtagattaattttttaaccaaaaaaataaaaaataaaaaataaaataaagtttacctgctacaattgaagttcttggtgatgggaaaacccacatcaacaccacattgtttaggaagtgcagtggctctgttttcctttaagttaggaatgtgagttgttacttcttcaaggcactgacatgcagcaattttttcatcttttgttggtgctgatgatttcacttccttgacaccattgcaacatgcagctgaaggggtatcaactttactagtgaggtattttatgcacggtgtcactgagctttttgccttttcacaattgtagcccttccctgctggctctgctgctataattgtaaggactaatacaacttgcagagttaagaatgctacagacactttcttcattttgtgaagatagtttctatttttcaatgaacttttctaggattcacttgtgttttgatgtggatggatgaaatggttgagggagatgttcattatataattgcaaatgtggtacatttctcaaccttgatgatgtgagcagtggttatgaattttgatttcttattattattattttttaatatttggagtgtggtttagatagaccatagaaaatggtaaagtatatgttgtattttgttcatactcctgtgttttggtttaatggttttgaattgtgatagcattagaatttatgtttgttttaggaatttaatttttcacagccgttggtgcaaaacaaacgataatttatctttaaaaaattatattttatttttcatttatgaaacttaaatataacaattattttattcaattctcaaattaaagttcactgaatatctcagttaagtcaatagaactactttttgactttggagtagtgcaacttgcgtagcaataaacataaattttattttgaaattaagaattgttgaatatattcattgctagtattttactattttattttcaaattaagagtcactgtgtgaaaaaaaaaatcattgaataaattgaaggttatattaatttgcaggtcattaaactatttcataatttataattagattctttttttttttagttagatacttgaacatgtatttattttttaatggttttgaattttgtttgctttagaatttattacgcatttaatttctcacatattttggtgcaaaacagatgatgatttatatttttaaaaactttaatatttttttcatttgagacataaatataacaattattttattctcaaattaaagatcattaaatatctcaatgaataaaaaccactctttgactttggagtagtgcaacgtaataaacattaaattgttataggctattcaggtattactaaacagtgtttttggaatatatgttaagaaattaaaagagataaatatttattttacaaattataaaataaagtaaaaaagataacaaaaaacatatttttctctctcaataaaaatatttaaatttaaaattatttaataatactctaaggatattaattaattttttattctaaaattgagaatcattgaatatactaataattattttactttctcttgttcttattattataaggtgtcattaacaaattttttgtcaggaataaagattttttttttaatttaattgagaacatgaaatttatcttaaattaatataatttttcaaaggcaagtgttaattagtatttttaggatattaattaataaataagatagaaattttttttactgtttttcataattttataataaataatttctcttttaattctttaatcattgtcttaagagtatcggttacccatatttctttttttaattatcattgtaaataaaactaacaaacattaatgtgttatgtttctttcttattgtcacgttattttataactaactttaatgaagggtatttttgtaaaaaaataataaatattgaaaacattttagattgaaaatcatacacctcataaaaaaacaaaagactgtactttatttttaaattaagagatattgaataaactaaaagtaaattaatttgcaagtctctaaagtcctgaactatttgatcttttatgattagaacactagagtattttttaaattgagtctctaaactttatttgtttttaattaggtctcaacaaatatctaattaaaaataaatatcagttcagctaatcaattggaaaaaaaaaaaaaaaaagttaaggacatatttaaaattggactacttcgatgagtctataatagtttatatctattcaattaaaatattcattgatccttaatttaataatagaatctttttttacacagatacaaaataattttatggttaggctaaattataattttgatttaatttaattttttattcacaattttaatctttttattttttacgaatttagttctcacattttagaaaatatgaaattttgattcaatcgacaattttgcatatactttattttttagtttgatctaatcaaatacttgatttaataagtttattttagatattatcaaaaactaatttaattaattacaatataaaaaataaaaaataaaaaaatgcaaaattgtaaattttctatgatgtaaggactaaaatcacataaaaataaggagactaattctgtgaatgaataaatataaataactaaatttacaatttagtttaatgttcataaagttaaactattataaagtcaaaaagtagtttatattaatgagaaatcttaacaatacactcttaaataaactattttgaacactctcgtattattagtcaaaatttattgaaaatcataattttatgtggattttactttttatttaattataatttattgttaatataatttttaaagtaattaaaatcaataaaattatcatacattttatgttgtgattggatgaggatataaaaattattctattatcaatgtataacttttttttctttgaaaaaaaggactagtacgtctatataaggaagtaaaaaaggtattcaatgaatattaacttaagagaaaaaaaattaatgcttattaaactgcaatactccaaagttaaaatgaagtttctattcattcaattgatatatttaatgactttaatttttcaataaatgtatgggtgtcgtttatatattaccaatatatttaaaaaaaaactaaaattaaagtataaaagacaaaatatactctaaaatttaaatgaacattagattatatatttttaagtttagacaatgtattataatttttagaaaaataatagagtaccttttatatattattaataaatgttagtcaattaataataaaatgtcttagaaaatgtgttactatcacttttcttttattattcaattaagatactcaatgactcttaattttttatatgtataaatcaaattcaaataccaaattttttacaataattaatgtatattgttcagtgactcttaatatggcaataaagtttgtattttatttatttaacacatataatgtttgaatatcttttatatattatcaatatctttaacaaaactaaaaaaaatcaaatattaaaagcaatgtgttcttttaattaatttattattattataatttaaaataaaaaactcatgtgaaaataactagataaaaatgatttaaattttttgtagtattaagaaacttttccccaatatttttagtatagtttgagaaaaaaaaaacattacataaagataaatttaaatttcatattgataagcctttttttttctttctgaagggcttgcggttcattacattaataattttttatttttttatttttatttttttatgttttatattttagtatatattttgtgcaaacaaatgggatagattaaatgcatgaaacaaacataaattttgacttcatcacaatttaaagttattaaagcaatatgaggaaatgaacagtatacaattaatgtttcaccaccattttttttaagctctaacactccaagtaaaattaataataagaagccaatctttcataaccacaccttacgtcactaaggtggttaatgtcccacatttgtagctatatagatgatacctctttcaaccttctattcattcccatcaaaatacaagtgtatcatagagagtttattgagatagaaattagctttacaaaatgaagaaagtgtttgtagcaattttttctctaatggttgtatttgttcttacagttacagcttcagagccagagccaccagttacagcttcaggaccagagcctccagttacagcttcagagccagagccaccaatcatacctttaggaccaccaaaagcagggccaccaaaagcaccaattacaactttaggaccatcaaaggcaggaccgccaagggcaccaattacaacttcagggtcaccaaaggcaggaccgtcaagggcaccaattacaatttcaggaccaccaaaaaaaggaccatcaaggacaccaattacaatttcaggatgaaaactttcttaagctcatgaataaaggcaaaagagaaaatagtacaataaaaaagatggatgctttgaagttgttttcttcctaaaaacaacaatttgtctaatatatgtgaaacaaacatttgattttgcaaataataatcaatgaaaaaatttaggtgctcttgtccatacattttcatcatatagattaattgtgttcaattaggttaaatcatttttgtttaatgcttgagattaaggataatgatctaataacttaaacaacttatatcaaaataaaactaagtgaaataagttatcatcttattagggatgataaagggtatcaagaccttatatgtaccaacaaaaatatctgtaaatggatagaacaaatacatgtttatttaggatgagttcggaatatatgtttatctataattttttaacagtgggtataaatactctaataaccctaccttacctattatatacattaatacaattaaaatattctatatatgtgaataatcacacacacacatatatatatatatatatatatgtatatattattaattataatttaatgacaagcacatgaaaccttggcttcctttcagagacgtaatgtcgatcaattctattgtcaagtgcttaaacaaatgttacgaataaaacgtgtttgcctttttaccgtcaagcgtgtaaatttttgtcaagataatcatatcaagctatgttccattaaaactattcataatgtgaatattttataatagtgtaaatttcacacaaatagccttgtgtaatgctactttaactttcataccaattcatacattgaaataactacaaatacattggaaggatataaatttcttgtaataatttcttgactagtatttttctaataatttattgactttatattctcaaattaaagttcactgaatatctcaattaagtcaatagaactactttttgactttggagtagtgcaacctgcgtagcaatgaacataaacttgttttattttgaaaattgagaattattgaatatattaattactagtattttactattttgttttcaaattaagagtcattgtgtaaaaaaaaatattgaataaatttaagtttatattaatttgcaggttcttaaactatttcataatttataattaggttcttaattttttttagttagatccttgaacatgtttttatttttaatggtttttaattttgtttgcgttagaatttattacgcgtttaatttctcacatattttggagcaaaacagatgacgatttatatttataaaaaaaaaactttaaatatttttttcatttatgagacattaatataacaattattttattctcaaattaaagatcataaaatatctcaattaaataaatagaaactactttttgactttggagtagtgcaacataataaacattaaattgttataggctattaaggtattactaagcagtgtttttagagtataagttaagaaattaaaagagataaatatttattttacaaattataaaataaaataaaaaagataacaaaaaacatactttttctctctcaataaaaatattttaattttatattctttaatcaatactctaaggatattaattaatattttattctaaaattgagaataattgaatatactattaattatttactttctcttgttcttattattataggtctcattaacaaatttgtcaagactaaagatttttgttaatttaattgagaacatgaaatttatcttaaattaatataatctttcaaagacaaatgttaaccaccttttatttttttaaccacttttctaagagtaccagttaccaagacctttttttaaaaaaaaaaattatcattgtaaacaaaactaacaaacattaatgtattatgtttctctctcattgtcacattattctataactaactctgatgaaggacatctttgtaaaaaaataataaatattgaaaacattttagattgaaaatcatacttttaatttagacatttataaaaagaataaaagagtgtattttatttttaaattaagagatattgaataatctaaaagtaaattaatttgcaagtccttaaagtcctgaactatttgatcatttatgattgattagatcattagagtatttttttttaattgagtctctaaactttatttgtttttaattaggtctcaacaaaaatctaattaaaaataaatactagttcagcaaatcaattggaaaaaaaaagttaaggacatatttaaaattgggctagttcgatgagtctataatggtttataactattcattaaaatatttattaatccttaatttaataataaaatacttttttacacaaatacaaaataattttatagttagattaaattataattttggtttaatttaattttttattcacgattttttttacaattttagttctcgcattttataaaatatgcaattttgattcaatcgacatttctgcatatacttttttatttattttggtttaattaaatcatttacttaataagtttatttaaggtatcatcaagaattaatttaattagttaaaaaataaaaaaaaatatacaaaattatagattttttatgatgtaaggattaaaatcacataaaaattaaaaaaatcaacatcttggatgaataaataaaaaggaactaaaattacaatttagtcttatgtttataaaattaaactattctaaagtcaaaaatagttcatattgatgagaaatgttaacaacacactcttaaataaactattttgaacattctttatattactagtcgaaatttattgaaaatcacaatttgtgtagattttacttcgcatttaatcacaattcatcgttgataaattatcatacatgatagattgtaattggatgatagtgtaaaaaatattatagtgtcaatgtataactttttttctttaaaaaaaaggactaatatatataagaaagtaaaaaaggtattcattgactattaatttaaaagcaaaaaaattaatgctgattaaactgcaatgctccaaagttaaaaggaattgaagtttctattcattcaattgagacatttaatgacttttaatttgtcaataaatgtatgagtgccgtttatatattaccaatatatttaaaaaaaaactaaaattcaagtataaaagacaatatactctaaaatttacatgaacattatgttatatatttttaagtttagacaatgtactatatatattttttaaaataatagagtaccttttatatatattattaataaatgttagtcaattaataataaaatgtcttagaaaatgcgttactatcactttttatttattatttaattaagatactcaatgactcttaattttttatatgtataaatcaaattcaaataccaaaaaaatttataataacttatgcatattgctcaatgacttttaatatgataataaagtttgtattttagcaatttagcacatataatgtttcaatatattttatatattatcgatatctttaacaaaactaaaaaattaaatattaaaagcaatgtgctcttttaatttattcatcatttaattattataatttaaaataaaaaaactcatgcgaatagaactagataaaaataattaatttttttagtatgaagaaactttctccccagtatttttagtctagtttgagaagaaaaaaaaaacattacatagggataaattaaaattttatattgataatatttttttaacgttttatatttttagtatatattttgtaaaaataatgtgataaattaaatgcatgaaacaaacataaattctgacgccatcacaatttaaagttattaaagtaatattaggaaatgaacaatatacaattaatattttaccattttttgtggttccaaggaacacactccaagcaaattaataataagaagacaatctttcataaccacaccttacgtcattaaggtggtcaatgtcccacatttgtagctatatagatgatatctctttcaaccttctattcattcccatcaaaatacaagtgtatccttagagagtttattgagatataaattagctttacaaaatgaagaaagtgtttgtagcaatttttcctctaatggttgatttgttcttacagttacagcttcagagccagagccaccaattatacctttaggaccaccaaaagtagggccaccaagagcaccaattacaacttcagggccaccaaaggaagggtcaccaaaggcaccaattacaacttcagggtcaccaaaggcaggaccgccaagggcaccaattacaacttccgggccaccaaaggcagggccgccaagggcaccaattacaacttccggggccgccaagggcatcaattacagcttccaggccaccaaaggcagggccgccaagggcaccagttacagctttagagccaaagccacctattacagctttagagccagagccaccagttacagctttaagaccaccaaaagcagggccaccaagagcaccaattacaacttcaggaccacccaaggaagggccaccaagggaagcaatgacaaattcgggcccaccgaaggcaggaacgccaagggcaccaattacaactttaggatgaaaacttttttaagctcattattagggcaaaggagaaaatagtataataaaaaggatggatgcctttgaagttactttcttccaaaaaaacaacaacttgtataacatatgtgaaacaaacatttgatgttgcaaataataattaatgaaacggatttaggtgttcttgtctatacattttcatcacatagattaatttgttcaattaggttaaatcatttttgtttaatacttgatattaaggataatgatctaagaacctaaaaaacttatatcaaaataaagttaagtgaaataagttattatcttattagggatgataaagggtaccaaaacccaatatataccaacaaaaatatttgtaaatgagtagaacaaatacatgtttattggggatgagttcgaagtgtatgtttatctataatattttaacaaacacaattgtggtgagtataaatactctagtaaccatcccttacctattatatgaattaatttaattgaaatatcttatatatgtgaataatcacacacacacatatatatatatatatatatattatataatttaatgcaagcacagggaaccctgatttcctttcacagacgtaatgtcgagcaattttactgtcacgtgcttaaacaaatgttacggataaatcgtctttgcctttttaccttcaagcgtgtaaatttttgtcaagatatcatatcaagctattttccattaaaaccatccataatgtgaatattttataatagtataaatttcatacaaatagcttgtaatgttactttaactttcataccaattcatacattgaaataactacaaatacattggaaggatataaatttattgtagtaatttcttaactagtatttttctaataatttattggctttataatattaataaagaacgggtaataagtgagggtatgggtatgaatatatggatatccaacatatatatatatatatatatatatatatatatgagaatgaagccaaaagttgctatccatttgggtatgagaacatgtgtaagtattttttttttaaatgtgtatgaaaacagatactatcgtatttgttatgaatgtaatatttaaaatcgctttatatcttaagtcttaagttagttattcttagcaacattgacttaaagacaactattatggatctcattcgggcttgtcacatggcccaaggcctccaaccatacataactacttcttcacgacttcacctatcaatctactatttcataagacatttcattcctacaagtaaaaagctaactttattttacacatctccatacactatttgactttagcatcagagtgttttgtgcaagtgattgcaggtctctcacctcgtcaaagatcgtcatcattggccagaatatttacttgaattctttgtgcatcaaccactgttgatatttcaccaactccttggatagagatcacaacattatccatccaaactaggggtgacaaatgtttgcatatacatacgagtagggttggtataaagactgatatggcctgcaaagcccctattttagatgggcatataagcttgatagatgatgtaaataaacatttttttcaaggtatgtattccacccgcaaaaacttgcgaataaacaaatcaatttgtgaactcaaatagtaatttaaaaaataatttttataaaatgaaaaatgtataaaattagaaaaaaaaattgatttattttttaagctaaaatctattatactataatataccaatgttttaaatataacaaattaataataataacctaaattaaagatcacaaacttaacataacaaattaacaatacttatacattaaatttagatggattaaatgagtaattcgcgaataaagtgtatcagatctataaacttaacatgccggattcagagctcattaaattcaaactttagaaaaataggtccattatccataagatttgcatgcttaacaaaacgatcaacgaatctatatccatatacgcatccccaaatacgagtaaacttcataacaaatcgaattggatagtcaaattaacactcatgagtaatttaaacaactttttttactctacctgttcattggaaagttgggagtgggtatcaatgtacccatgtactgcttatatagatgaaattacttaaatacctttacatatacatatatatatatatatatatatatatacccatgtgaccatgtctattttattaacttttcaatttcaatttgtctctattaatttttttgaaagacatctgtaactaatactgattatcattcatgtccaatcttccaccttcacacaatttcacataaagcaatgcaaaacaagaataattaagaaagggaagagaaatatgcaatatgtgtattatataattttatgtggtcctccatctgatttcatttattattatatacacaactttacagcagattctttttctcagtaggaggacacaacacaatagaagcataccattactaccagtttaatgctttcaccaactaagtactacagagtactagaaacaaaacaaaacaaatcaagtgctcttataactttagagtcatttttccttcgttctgatacagtgatatatccaccacgttcgttcattcttcggtttctccgaatctgatttctgatttgggaaaatgctcctcggattctcaacgttagcgttgttggcgtgtttctcatgttgttggttattagtgttgggcgagggtgaaacggtgtcgtgttcgaacatagtggagttggggcaccgcaccgacaacatttccataacggagtttggaggcgtgggtgatggacgcaccctcaacacgaaggccttcagagaggccatatatagggttcagcacttgccacgagaaggaggcacgctcctttatgtgcctcccggggtgtacttaacggagccctttaacctcaccagccacatgacgctgtatctcgctgccggtgccgttatcatggccacccaggtaaacaaacgcaccccaaaggccccaaaccattttttataattattttacaaaatatattttagtatcctttagtggataaagaaaataattaaaataaattattatgccaatagggtttaatttttagttggttcaataaagtaatgagagtttattgtaaatttttcgttatttatcttttattcttctgataaaaaaaagaatgtttagtaaattatttatttatttattaattacattagaagcatgaaaattatttaagtacttatttttttgagtaattagaatgaagattcttttaccaatgtcttttaatactcgttttgcgaaatcactactcaaaatacgaactgttgaatattttttgaattccttgtacaacaaacattattatttttattcaatgtagtgctttttagtttttatgttatctataattaaatatttttctattttttttatctctaacttgtaaccaatccctaaattttaatattaaattcttaactaaaatcaacttattatgtattataaaaggaaataatttatgagatttaactcttctagtgtgtgttttgtaaaaaaaatctcttttagtgtgattaattgttattaaggaaataatttatgaaagtaaagtaactaattttaattgttattaagaaaagtaatagttaatattttaataaatataaatatatgatttattatgtattgtacatcatattaatcgttaattctcttgttaacagttaaaattactcactttatactattaagtaaatttattagagaagtcaatggaattttatgcaaatgcaagcaaaagattgtcatgtcggaaaaggttattactagcgtggttaattattttttgtttgcactttcccccgtaagtggacattgtgcatatttgagcattatgcaacaaagccaatcttatcttgtatgtgtattttattaatacgtatataataaagtagtatttacaatcttgagttaaaaatgaaataattttttttattgtacttttttaagacagacgaatttgtaattgtttaaaagataatcaaatttcctttaaaaattgtcatattattaatacttaattttttctatattattttttcctaaagctactttcaaattcatttttatgctaatttttctccccaaaacatagaaattcatcctgttaaattagatatactatatattgcgggtgatttactcttttagtctactcttccttaaaaatgatatgacgcatgagtaattccaattattttaatttaattatgagcctttcttttgtttacaattctatttttttggtctcttttagtattgttttagattttttatgaattaattacatatatcctgtatttgctgaaatatttgtacggaatgcttgctaattataaagttatattaatgacatggattaagtttgctgttgtatgtaaccttttgattggcttagttaagtttgcataaggttttccccttatagaaaccttgctatgcaaaatcatgttagcaaactcttcaccgactaccaaatataacgaggagaatagaggaaaaagagagaaaggaacattaaagagtacatgtgaaattgtacatctgatgttcccgtgcataaaaaaaaaagatgttacaattaaaagcttatggttataccaatgaattgagtccatatatgtacgtgtttatccgtatgattggtggtatggagtatggactatagatgattgtaatggatcgtgggaaacatataatctccatgatctatggtgggtccatgctgaaaggatagaaagttttgttggggtgtgtggtgggggggggggggtctagtcttcatcaatgcatggcacagcatgacatttatggctttagccaattatttatatggcagcttggatttctgacaattactgtccttttctttgataatcaagtggaagtggggtactcacttattcttctggcattaaaccttgttactatagttcgtgtggttaaacaacacaaactgagatgatgatgatgactatatctatgctaaattgatttattttgaatatcatagttagtgaaatggtgcatatgaatgcagaactcttcattctttatcattgttattcccaaaaacaatgaattcatcgccaggtagttatctacataaaaaaattacaataaattcatctccgaataacgttttcatggtatgctcaattaaagctaaacacctttgtttcttccttcttaaacattttattgtttaaagagaaaaaaggaaacaaatagataagtttcagatgaacaaggactccactttctaattaatttccttcattgtttgattcattaggattcattgaattggcctttgattgcacccttgccatcttatggaagaggaagggaacggcctggaggaaggtatatgagttttatccatggtgatggagttcaggatgtggtaatcacaggtgggtatcttatgtttcctattttttaggacatctaatctgattttgtggtttgtaccagaccacatagtatactacgataatatttataaacatatttaattaaaggtgcgtttgatgcacctaagggtgcagcacatgacaaatacttgaattacatgacaattttttgtcttgtatattgtttggtggatgatggacaaaggataaaagctttacaatatctgtgcatgttttatttattcaaagctttatactgcatagtgcatattcataattgagtggaaatctttggtcctgcgagtttctctattatggttacaggattgtgtccaaactatacctttctctcacacaattcatattttcataggtgaaaatgggacaatagatgggcaaggagatgcgtggtggaataagtggaggcagggaactcttcagtttaccagaccaaacctagttgaatttgtgaattctagagatattattatttcaaatgtaatctttaagaattctcccttttggaacatacacccggtttacagcaggtatatgccactttaggtcataaggagtttataaagtgtgttcatggcattccttatgtcctttttttatttattctttggtaacattgttttaccataatgtttgtgggaaaattttataaacaaatttgtaccaattctttataaacttgttactttgtttcttgaaactaactagatctcattctgaaatctgattgcatattgtcttaacttctttgcagcaacgttgttgttcgatatgtcacgattttggctcctcgtgactctccaaatactgatggcattgatccgggtaagtagtaactgctttctaaatatagaaaggctagcaacacatttttttaaatttattgaaaattaaaaattgtgagactcacttcttatttaacaagtttcacttataattttacaatttcaataaatttcaactgataatagagtttgtaagaacgactgttagagagtacacctcttctaaatatgccatatcttgtgcaaatagtgaaatagatacaaccaattgaaatagtcaaacactatgctaagttactaactgatctcattttattgttgtaagcaatgcattttggttatagtatttcttcccttctaagatcagtatgtcttgtttcatttcggagacaaactgcactcaaagatagtcactgacatgagatttgataagtactctaaagttctgtatttatgtttctttccttcctagttaataaaccaacacttaaatactgtagtttaagggcaaaacccacaggcatctggtggttgaaatattatggcaccattttgttggtatgacaagtaaaagaacccttgtatatccattcatacaaatatcaattcgtttatgcagattcaagttcaaatgtgtgcatagaggattcatacatatctactggagatgatcttgtggctgtgaagagtggatgggatgaatatgggattgcttatggccgtcctagctctgacatcacgatccggcgtgtaactggatcgtctccatttgctgggattgctattggcagtgaaacctctggtggggtggagaatgtacttgctgagcacatcaacctttacaacatgggaattggtatccacattaagactaacactggcaggggtggatttataaagaatataaccatgtctcatgtgtatatggaggaagcaaggaagggaataaggatctcaggtgatgttggggaccaccctgatgacaaatttgatgccaatgctctcccacttgtgaagggtgtcacaattaagaatgtttggggtgtgaaggttttgcaggctggcttgatacaagggttgagaaattcacctttcactgatatttgcctatatgatatcaaccttcatggagtgacaggacctagaactccaccttggaagtgttctgatgtgtctggatttgctcatcaagttagcccttggccatgttctgagcttagcagcaaccagcagggatcatgtgccaattactcctgagattatgggaatatatttccatttttcaagcattgacaggggcaacttgggcttcttttgttgatttatcataatgtaaggcaatgaattaagtatgaaatgcaaaatgaagacttgttggttttaaaactgagtagaattgattttgacagaaataatttcaaattactgaatgtaattgagaagtatgtctaaattagtttcagtcatagattttatattaagaggtgtcacaatgaaaataatgaatttggggtttaaataaatatgccctaaatttattcatttcgttgagcattatgttaagtaatttttatactgttattgtatttttttttctttagaaaaacataagtggattttttataaaaatccaattgattagagacaaacaactgatcaattacgtgaattccaaaagttaccctaatgattaaggaggttatactaatcaattatggtcattcaaatattaatttagataggcttagcatttagcaaaaacaatataaatatagatacaagagtaacatttacaaagaagtactgctatagaaaagcggaggaaatatatgagatgtgaaaaagactaaaacaaatcattataagaacacgagactaagagactaaactagataacgtgtctaaaaaccaatctaaggaaatataacatcaaatattcaattggggtaagttttcttttctcttatacctaaaactctaataaagtttatttatctttaagcttagggcatgaaattttactttttcttcctttagaatatcatggaagaacaactaaaacaaagaaaaatcataaacatttgaacttggagtgagagattaaaggcataagaaaccaaacactagtgctcagtttggattaaaaataaaataggaagaaaaaacaagacagataaaaataagaatgatgcaaaacaaaattagataaaaaaaattaattgtttgaattaaggatgacattagagcgagactgatacatgtaaacgtgtagtagtcctcgtcaccaattccattgagtaaaaatccatctcatactctctatacccacaaattttatcaatacttgtgggaatccatggatacttgcaaagatttctttttttaaaataaaaaatttaacaaatgtgctaatcaataatttatttaaaatacttaaaatccataaataccccaatcaaaatacttcaatttagaagttaaaatatttcaatctaataagtccaaacaaaagattgagaaaaatacttcaattacttttttatttatttctaataccaagttccaatgaatagtaaattgaaagaaaaaaattaattgagattgatatcattaaattggttaattaactttcttagttaatatgaattattattttcttatatttgagatcgaaggaagtattatccaataataaattattatgtataatacactttttatttttcataatagttattttaaaaaacatatctttagtgatatccaattaattaagtttttttctttcaaaaaaaaaatatagactatgaaatggaataatgtatactcttaatttatgagtatggatgatgcaacgaaattgaagtaaggataattttttttagaataatatatattttcacaaaaattaaaatgattttatatttataaatttgcattatttgaaagtcaaaaaataatttcaattaatgaaaaatgttagtaatatactttattattgattaaaatttattaaaaattataatttttatacgtctcagttcttatttaatgaatatctcttcaaattttataattttaaataattttaatcaaataaaatataagttataaagaatgtgttattgacatttaaaaaaatgaaagtgtgttgacactatttttctattcatttaattaagataggatattcaatgactctctataaaaaaaagatattcatttaatgactcttaatttaagaataaaacaatttaatgcttattaagttacgctactcaaaagttaaattcatttaatttagatatttaatgacttttaatgagagtgactccttatcattgagttttgtggtgaggaagaaaatggaaagaatggaagtgaatagttataaaagaaaagcagaaaaataaataagaaataaagtgtaaatcaatattttttatttatgaaagtgaaataaaatagaaaagagtgaaactaaatttgttgaggatgtttgatttgaaaaaaaataaaggaaagtaaatgggtaatttaatgaaaatatcattttacccttagtctaaaacaggtttatttatttatttatagccaatcttgaaaaaaaatttgatcagtgcgtcatttctcatagaacttgaattcacattaattgcatttattttatcagcgcattaaatgcaaatttgatcaagcggtgtcttttgtttgctagctcatgcattaatatgctttaataaattgttgcaattggagcacaacacgtggattccacttgaacatgcttgcgtcaacttttgtagctatatatagccaacacgtacatttctcacccttcaattcatccccataaaaaacaagcaaattaatcccataaagttcattgatatagaaactactagcttcacacaaaatgaagaaagtgtttgtcacatttttagctcttctagttgtatttgttctcacagctacagcttcagaggcaccaattacaacaaattcagcaccaaatgactacaattgttcacaagtgaataacttgttaatttcgtgcgtggattacctcattggtggagatggtatcccttcaggtgtttgttgccaaagtgttaatgcattgaaagcatcagcaccaacacaaattcaacgaatggctgcatgtaagtgctttttcgacgtagcaattcgccttccttccttgctagaaaacagggcaggttcacttcctaaattatgtggtgttgatttgggttttatcatgagcaagcaaaacaccaattgtaacaagtaagctttctttttatttccttacttcatttttatcttagtaaaaattaatccatcatactaattagtcatcattagttattttgttttcattgacattggtttttcttcttctttctttttacagtgttcatgtaagctcagggcaaagggggcaataatacaattaaaaggatggatttttggaagtttcttcttgaaaaaaggaaataaaacggcttgttgaatgtatgtggaacaagcgtttcatgttgcaaataataatgaatgaatattttctgtgtgttgctcttatccatgcatatatcttcatcacatagattaattatgtttaattaaattgtgtttaatgcttgagattaaggataaggattcgccagcctaaacaaattgtatcaaaataaaactatgcaaacaggttatcatctcatgagtcatggcatgatacacatgttgggatcaaagtacacaacgaaatattaagagctaaacgaaatttctccttcttgttgcaaactaaccagaaaagtatctaagctaagccaattttaacagtaatactgcaatagtaataaaagaaatataaaagcaaaaaaaaaaaaaaagtaataataacatggaaaacttctctcaatgtgagttaactcgatccaaagccatggaaacacgttttctccattaaaatttaagacgagagtgtaagttaaattctttccatccaattataatttttagacataactgtatagtattttatacaaaaaattaaataattttaatgtctaaaatctttcaaattgctttcaaaagaaaatcttccacattggcatcagtaatttagtggtgtatataggcagaagatcttaatcccaaaatcatatatactacaattgataattaaattacctaatgtttttcacggataaatggtattatattcttttaagatttttttttttgaaaaaaaaattgtagagtcggttttcttcaaagtactattttaaaatatttttaaaatgcaaataaaatactagtacataagtgattgtgttaacattagttttaataatgaaagaagtttaactcaattaattggctactcataatatatgttttattctatgctttttgatacctatctttaatttttaaggataaaaaaaatcaatcttaatagttaaaattgattattaaaaataaaaatgatcaagaaatagtgattatatcataagtattaaaataagttatttttttactttaattcttaaaatctacgttgataaaactgataataaaattaatcacctttatcaagaacacaatttaatttactcgtaacaacattgataaatgaatgaaagggggaaaatgaagaagcactagggtttgctattggttcctacaaccctcaccctcaaaaatcacaaaatagaaacataattatgttatgtatttttttaaaaaaattattattaaaatgattgattaatatttctttagccaatagttaaatacaagttatttttattcttaagatctttcaaatttgtaatttatatttgttactctcaattagaattctatgataacggttgttattattatacttttttccagatttttgacggcttgcaagaaaagggatatcatgtgattggatgcaacctccaatggaaggggtgatgtcggtgagcttgctgagacagaaaggcgtcaatgtgtgactgcgcagcacgccgtgatgcagagatttaacgacaaacactatttcgctaaaacaccgcaaatataaaaaataaattaaaattgacaatatattttcgttgtgttatacaatataatcatgtttcccttatacataatacaatgaaaacatgttttcttttttataacataacgtaaacatatttttattgtattattcggaggtaaaaaaaatataaagaaaaaaatatgattatgttgtatgtgtataataaggaaatcatgattctataaaaaatgacatttttggagagaaaaaaatcttgcctatattgtaaggaccaatagcaagagtattgggagcaataacaaccaatagcaagcaagtccatgaagcaaatgtggctcaccttagaagtttaggtaagaagcaggcaaaatagatattttctagccaattttatactgagccaaaattttgttaaatcacaaccattgattaattattgcacataattaaacaagaaatagaaaataatcaacggttcggatttaggatgcaaggaagctcgtgctgcagcggcaggagaggatcgaaaaagttggagtgaggtttttcatttttgtgttcacttgagaagcagaagcagaagcagaagtagaagcccgtgttgagttctactttccactgcacaaacagagcacaacgcgcacacacgccatcgtcatgtttctgccagaaacgctgtttgttagcgccccgtcgctgtcactatcactgtaactgtcatataaaaagcactttccctctcttcccaaatcttccatttcatggctattctacctcctgctgcttcttcacttccctcgtcttctggtaagtatcttctttctctgctattcaatttccgaattcctgttactctttcaactcattcgttatttcatttctcaataaaacgaatgagcttactgctttttgtttctatttctcttttctgtttggattctgcaaaattttagaaacttgcttcgactcctttataagaaattttcgtgctcgtgcatgcatacgtaggggaaaatgttctcaagttatgaggctcaatcgagttttaaagaagaagaatgctgacttatattatttattcatttgctcttacaataatagaactgtggagttcggcggagcaaaataaacaaatgaataaattaaaagtgttttttgtaatgtattcggtcttcagattgtgaagaagtccaaaatttttagggctaaatgcagattttaggaatttgatcatgagagtgagtgcaaaattctgattcagagtagatttttgttttcgattggtatagcttagatgattgttaattattttatacattttgagatttcttttgttttatgcgatttgagatacttacctacactacacgtgttaacatctttgacttgagattttaaattgtgttcgagtgctctttctattggatgttgttttcatctttgttcaacattgtgtgtcttgtagaggggatatgttgctctacttatggaataacaagcaattcaatcaaacttcctattgatggccgaaggtggcatgatcttgccagcacaaggtgcttacattacatgaaggatgattatttatccttattcagctttctcttgcttatagaactgtattagttatagtagatgtgggatcatacagtttgttttttaattagagactaggaaaatatgggaagatgttttagacgtatttgcatccatgatccatatcagtatgataatcatctattttgagtgactccccccccccccccccccccccaaaaaaattatctatatagcttagcaggtttaatccatttagttttacgctcaatgtcaatccactttaactagaactcaaattgttaagcggagtccaagaattatttttataaccctaacacatgaatcctggatggatgctaggattttagttttgttgcatgattttactaccggtaacctaatatttatttcagatgaagtacctagaaccctcaaaatatttttattagtctcttccttctcctgattctgcaatcaaatattccatttactgtgttgtttgaaaattcaaaaaactgtgatagatgcaattatttatatcggtttttttcttgtcacttgtcaattcttgtcctggtaatcattcttcgtgaaagatctaaaatgctttgtttactgaaaatagttttggttatctttaggtgcaaaagtccattttttggatcaccacacttcctttggctatccacagggcatgatctgtgcctttcaaaggttaatgttgctgcagactattcagattctatacccgattcttctgatcacatggatggacaaggttatcatcctcttgaagaactgaaaggttccaacgatattcagccagctagactctctcctgctgaaatagcaaaaacaactgtggaggtttgtgcctatatgcttttgtgcacatgaaacaagttaatttgtgatatctagggctacagacctagtacacataatatgatgtttccattttgctggacgcattttggcagtatctgtatactttttatcatcatgccctgtttgttggcattaggctaataaaagcgctttgctagtatttcctggaatggtacactgtgaaccacatgaccagatttcatgggctgagtttcaatatcatattgatgatgttggaggtttgttttctttttgttatgcatatatttttgtttatgaaatgagaattattagttaccttaatgaattcctgattcagtattaaacatttagaattataacctattgcttttgtttcctttttttttttttcctgtagatatatattttgaaatctctgatgatgcaaaccttttggcggattgtggagccaacaatcctgtggtaggaattttgtatccgttttcaaagggatttatttgttatacatgctaaaagattggccaaatatacttagctgtgctgctgttgagcttttttttttcttccctctaatgaatattccatatcctttgttcttttacttctttgtcttcccatctgataagaattatttttataaaaaaatatttaatctctttttaaaaatattgatggaatttgcaggtagtaaacattttaagaacccccaaatgctttgcttctgggaatcatgtgatgggtctttctgtcaaacctctgtgcacaatatttctggttataacttataagtcttaggcttctaatctcttgcacctacttttcccttgatgctcttcttttctttattttttatgtaattgggactcccagttagatttcatgtcttctcccaaaataaaaagccagtcatagatgagatactttatttcaaattatatgaaattattaatacagatccagagattatgtagtcattttaaagtattaagtgattcaactgtctttgtgcaacaactattaaagtgctaaatttgtagtttggatgataaactgaagtagttttgtcatggtatttttgtgttccataccctatctttgacatagaagttgtgaaattgatattctaagtccgtgtttcttcagaatgctttctttggaatggacatcccaatatatgataataatagaaggactgctagtgaatatgacattttcaataacggcaacaatgatgaattcaaatttgatgatgatgatattgaggtttgccttttcaaatgcttaaattatgaaatttattcagttgttttagttactaattgtttctttttatgcatctgagaaattcaaatcacaagtatattcttctgcaaacaggtttcagaaatggaggagtttaatattccagtgaattggggacagtctgatactacaaactccgttcatccaatttatttctcaaagtgcttaaaaaaggttctcccccccctccccccccccaacacacacacacacaaaaaaaaaagaagaaaactgataactaattttcaagtttcaacatgagaatgatttaacagattcataggctctggaagaaataacattgatcctttatgaattttcttataggccatcaacaacatggtatatgttaaaagaatgaaccatccttcaaatggtgtttctataatagggttccttagacccgtttatggtgaagaaaagtcatatctaagatggatgtatcatactgaagatggcgatgtatacatctcagactggagaggtatctgttctcttcaagtttgatatttctgatctataaatttcctttttatacttttaatataaaatcatggtgagttttttaagagcatttttttttatcagcaaaatatatgtattatattaaatatagatgagtacaagtggtacttttctatttacattgatgccctactatgtgtaatcctatggagccataatacttcctaatactgcagtattgcaagaattaggagtccataagactatataggtctttgtacccctccagaaaaaatatcctataaaaccaccctcccctgattacaaaatcctatccttatattactggcccaagaatggaaagggatatcaaatcctttttccagatttttgagccatgaccagcagaaaaaaacagcatcatccaacaacttttgaccattgaaaccttcatttgagaagaccaccctattcctatggtaccatatgcaccacgtcaatgacatccaccatgtttgctagcgctgagatcttatgcccttgagataaccatgtgtgtgctgaagaaagtgatctctaggagtttccgggtaaacaccgacgatgtttagccacgataatgcttcccaccatagaggccggatttgtcacagccaaagacaagaggtgacgcatcctcctcacagttactacaagaagggcagattacgtcattcagaggcacattcctcctacttagattcatctttgttggtaatctatcccgaatcaacttccaagcaaaacatgacattttactgggaactttgattttccataactccttgaacagaccatcattattcacgcctgatggacagctacttatcaatttgtaagcactggccactgtgtatcttccactagaatctgccccccaacaccaattgtcttgctggttggcctgcactaccaccccttcaatgtcctccatgaatttagcaaccataacaatctccgattccctgaaaaatctcctccattgcagctgccactcccaacccccctctgctgcacaccccaactgatgtataaagtgatgatgttgttgagatatgctgtacatatgcggatacatttccaacaacgactcctcaccacctagccaaacatcttcccaaaacttcacctaaaattaagagcatgataggttacctatcagagcaactctatggataactgtataaatttcctaaaattaaattttgtagagcatagatttttattgaaggggaatgttaagtttcttgtgttggaagttggagtaaaggatataattacacatttacaccgatccagttttaacttttatatgttactttatgtttttattatgtaaagtaatttattaatttgtaggctaccttttatatgcattttatatcatactttcttgccatgatgcatttctgaagaagaagcatgttaaagagggcagagtgctctgtacttcctcagagtttcatattgcagaaggatcttgtttagttgactaaagttgtggtactttattgaacactcaaactttggtgctagttgtttgggttcagctacttttactcattggttcttgtctaggaaagctaatctaatattgcaatatcaatataacaacaaagcttgaagcttgtcattgtagttctctgagcataatgcatttatgtaacttgaggaggtagagcctcttcttcctcagtaatatgaaatcttagctttgacaaaaaaaatgttgattaattggtaaattgccttttaactttttttttttttttttccttttcaatctttggatggtgaagatttttactcaaatagtgatgacgatgatgaaagagacactaatttgacactttatcgattggagatcctgtcaatcgagctccactccatgtatggatatcaggcatgtatctcaaaacagatttctatccctacatctatctattcttaaattatatccgaatagtcaagatttaaaaaaaatataaaaaatgcagatgactattttaagtagtcatgtgaccactaaataacctttaatcttgacaatccatgtatggttatatgacctagatttatagctctgacattcttaaaatgagaattatttatacacacacaacttgctagcatacaagtgggtgtatgttagcacccatgtggttaagacacctacttgtttttagaaagaatgtgtaaacatgttataattttatttttaaaaaatacaccaaaaggtgtagcttactaaaatattcctagaaagcaagttaccaaaccccgatatttttctgtaatttgaagcattattaagtttgttgagatttattctaaattacaaattatgcatgttctacctatccacaaaaattgcagtctgaaattagtgtgctagactttcaagatgctgaacctgatatacttgcacactcttgttcggaaattctggaacgcttcaatcgattctgtgatgatgaaattaaagcactttgcaagaagaaaggtctttatggcgaggtaatccaattttttccccactctaaccaccatgcaaatctttcaagtaaatcaatttcatcatataaagggtagtaaaataatttgacatttatttacatacatcttcattcttttcctttatgaaaccaaataactgaaggaaagcctcccttattttccattcgatgatatctgacaaggaaagtgatgattcctttacttctctccttttcttttctatgttattcatttcccttcatgacaccaaacaaaacactcacacataggaaatgactattatttggttcgttatatttttatactttgattttgtatgtctactgttaatagccagttgcttatttcagtgttattacatggtttccagggagcttacctggttggggttgacagccttggtgtggatgttagagttctttcaggtgcagaagtaaaaactcatcggtttccattcaaagtccaggtaagcgttgtgggtttcaactgaatgtacattatttcagattgattctgtcatggaccctcacctgaacatcctggtgagaacatgtctattagttattaaaacaatctagatcctataaatctctcatgggataatttgaggcttgattgtgtaagaagcttatgatttttatgttatccagtgtttgatgtggcatcttaaatgataatgttaaaataaatccaatgttatataatagcccaaaaaatattttattggcattattttgtaactagagcagtattatttgatgaatttattttaataatatttgaagcaaaactacaagtccaaggttctaagtcaactaatttgtcacacacatatcacatgcttgtgtagcacacaggaagcgaatttgaacgggattctccaaaaatgtattttttgtaatatttaggaagtgagcttctcaattaacggtttagttaggatgaagatgaaaaagagaagggacaagtacaaatctccagggccactgctgcataaaatgcaacaaatgtgttgtattgtcattggttggttgtgggctggggtaaggtgatgaacatgtgatcagaagagggaacacactgttgtgtttgtgtaattgaccacacttgaaagaagcctttacagtccacaactgttcatttaaggcatttttatctaatggttagcaagagccaatcacgtaggctatttcactccataggcttggacctacataagcatttctatggggcgataggtataaatttgcttaaagaagaaatgtccagtatggcatttttcaaattcattaatggattttttttctccaatttgcaggccgccaatgcaaatgcagctgaaaaacaaatttggcaactattgtttcctcgctctcggcgaaagaagaatatgaagaagtggcggagttccagcatgatttgagtatcccttggtgattggtccttcttttttgactttgtccttttcaaactgctggtagagtctgatatggagcaattgatttcttatggtataaatagtactataatctgtacattttttccaggtaaatccaaaacataatttttttggtaaatcatcagagtttaggaaaagaggaggtaggggtgttgtcactccagaaaggagtattggtggctgccaaaactaaacctaggcttcaccaggtttacttggttgttccttaccagctaaatcattcccctgttggccctataattttacttagatttgaaaggggtcaatggcggttatcttctttttcctcctctgacttccttatagataagaagtattaaaatgttagctttgtctttgctgaataataagtaatggcatttatggataaaactgttacctcaagatatttctcaacatgatttttttaatttgcaattattctatatgattagcacatttttttttttttatagttttgagttttacaatggtttatacaaaatataaaagatgttgccacaaattagtttttgtatttagtacattgtttatcttccaaccttttagtacgagacaaattccagagctagagcagattattttggtgaccgcatcaccagtatagtagtatccttaagaattactattaactatatatttgtgtgtttcgtcttgtttttttgttttttgtttttttttgttttttgtctcaagatatttttaagttgaaaaataacttgaaaagtttttttctttgacgttaactttaaaagttcagccaaagatttttggtatttttttcacttttttttttcttaaagcttttttttggcgaatcttaaaataaataaaaattggtctctaagttgcttggttagtataatactttcagaaaagcccttacgtttctaaatttatggtcaagaatacgtaactgcaaacttatattgaaacaatactgtaataatgatagaatttcataataaatgctcatagctagtaataagtaagcaacattgtaacaaaaccaacacatataattcgtataatagaagcatacttaaaaaatatgctatttcaatgaaaagacgttgaaaacagacgttcattgataattttagctctaaactacagaacatatttcatcttccactctatgactgccactggaattatgtatgctcatcttctaatatcaacagatatgacaagttattatatgtgacattttcaatgtgcaatattgcacttatgctgttttttaaaattccttcgcttgaaggatatcatctattacgtgagctggagccattcgtttttgaaatacattttttttacttctgaaaatcttgcggatattttatttagttaatttataacaaatttttattataaatgttatgttaatatgccgagaaatttcacgactttaaatattgtttatgaagaatttttttatactttaatataagtaagttgctaatgatttttttagttaatatttttttatagtgatgtaaatatcatattttacttaatttttggttaagaatttaaagcattatacgtttttctgaaatcagtattcaaatttcattttaatatgattataagtatataattttttttacatgaaagtatacaattatcttattttatatcaaacacaattttttaaaacaaattctattaacaattttcatatttaaataatttttttaaaaaactctcccaaataatttttagagacaatattgctcggtgcattgcacggatactctttctagtaaactaactataactttcattcttagtttattaacactacgtaattttcctgaaactgctgaaacccgttttgtgtttatatcattttctgatccttggttccattaatttttcatatatagttgtgtaagactgccagatttgtataagtacctcacataatatacatcaaacagcattttagatggtaacgttacaaagtccaacgtttaaacatatatgcgttggaaaacgtgagtgataaagaagaaaaatttgttgagatgaaaaaaaatgatttaaattacataaataacataagtaaataattgcatgaacaactttaaatcaaaataataaagataaaaagggtaaaaatgtgtttgaaatgaaagaggtaaaataaaaattaaaaaagtatagcattatgcctactttttttcatatcaaaagaaagataaatttttgcctttgtcaaattacaaattttaattctaactcatgtatctgggggagataaatgtatttttttttcaagtattttttaaattttataagaaaatttccttaaactgaagtaacattttctcgtcgtaattttttatacataaaaaacattatgctttattcttcaattaatagctgtagattatcctattaacaagttagaaaaagggttttaaaatattcaattttaatattataaaaacgacaatatacttctattataaattagtattttagcttatgtaatctataaatcaaatgcttatttttatatgattaaaattttataataaataatatttttgaatgtataagttttattatattattatgaattaaattttgtaataaataaatattttttttagatcaagaaacttatgtcatttccatcataagtaaatcagcaaaaaaccagggatagcaatttcaacacataatcttatatttccatttatattatttattataaattatgattataatcatatataaatatgaatatatatatatatatatatatatataagatgggatccgtttacaccggtgtaagaattaatagtcttacaccatttaataactttttactgaataaatattttataaaatacaccgttagattaaaagcttatattatgtagatcacatgtctcaaatttcatattaatccgaaatcatttgatatctaattgatatatataaaaattaacgtaatatgtacttctaaaatatgtgaaaattagactattcgattacattcatattgatgtttaaattttgtgaaatttgagacatgtgatctatatgatataaactttcaatcaaacggtggattttgtaaaatacttatccaataaaaagttattaaatggtataagatgtaaatggatctctcctctctctctctctctctctctctctctctctctctctctctctctctctctctctctctctctatatatatatatatatatatatatatatatatatatatactctatgcacagtagtgactaaagtactactaattattataaaaattaagcataataagaaatatttaacagtaacccggatcagaaactgcgaaaagtctctctctcttttttttctggtttgtttttgcagcaaaaaaacaaaaatcacaactctctattctgtttctcttttctagttatgttttgcagctgaagatatcaaaatcctatgaaaggagacaaagagagtgagagtggttgttgcagtggccgtccaagtttgaaactttagcatattcaaaacgagacccatcattaaaaattcagactttgatagtcctttcctctttgttctcattctcccatctttgtccgttctctcccgtcaacgttgggtttctctctctctctcctcagattttgaaatagaaagatgacgccggagaatgagaatgagaatgagaaggagaaggatcaggtggtccttgatgcagcagggatgaagaggtacaggaatggtgaaatctgggagtatgaggctgacatgcgtgtctcagatggtggcactggtgtcttgttgggcttggatggtggaaccacctccactgtctgcatttgcatgcccatgatacccttttctcactctcagctccaatctctccctatccttgcaagggctgttgctggatgctccaatcacaatagtgttgttggtaatttcataattgcctcttttctcttgcactcatagtgtttgatgatttcactttgtgggttggtttcaaaatttgatattgtttatgggtttgttgggttttagtatgtttagtgggtttgggcattttcaatgatttggttgtttgcattaacatcctggttggttcagtgtgagtatttttcaatttcctttctttgtgggttgggacaatgggaaggataacagagaccccttgatttggatatacatttgactttgcataccttaggaagatgttgcttatggcttttagacaatttggtgaacaaaacatatctggtactgaaggaagtaggtattttgttatattatgaagccaaatgttttattgatgtaaggtagtcaccggagattatggcctacaactaagctgttggagattgatggtttaggaaaagctgcaatcttatggtacttttttttggttggagttgttaaatgtctttaaaaagtacatacttgtgataggattttctaactggcattctgtaaattctatttggtaagtatttgacattttgaaattagaatgagatattgtttggaatgtaacaaagctttctgtagaacatccactaaaattatggctccagacatcaataatcaattttcaaatgttctttaaatatgataatcaatttttaacatctttggtttatggcacaacaggtggagcctgctgttggtgcggcatggttagcttggaattttttaatgaaagaatgtcacaaaggctgacaattgatgaaagtggaatatgagaggaaaaaataaaaatggaaagaaaaagataaacgacaacttacaattcttgatgattaaaagtgtatattacataatgacgaaagtgtgaatacctatgatatgccatgtagtttatgtaccatccaaaatctgtttattttagttcatggcacatggtaaggcttagttccccccttcactaccttaaggtcatatacctatgcttgtgtaaataatttatagtggcacaaaacacaatagagaagtgtcttaattgtcgtataactgctatttttttaattatcattaattgttgttagagaatcaatattaacaatttggcacagttaatggaagcgtgtataatgtaattaacgtggctttatgttaatgttgttttttattaagaaaaacatgagttccatattggctaaagaaaagatcgagaaatagtatataaggaagggataattttcactttatgagctaattttttaagttgaattatatttaaattcatattctaagatgatattagaatctatactatatctatttaaatagtcatacgagtttatcctatatctatttaaagagtcatctactatgttatttaaattcatgagctaatttttagagttgagctatatttaaactcatattctaagatgatattataatatatcttatattcatttaaagagtgatgagtctattctatatttatttaaagagtcatctattatgttttttacgcataaatttaagctaaatttactttagttaaaatttgttttaaactagtttctatttatttgaaaagaaattacttaaatataaaatgttgtcatgtttactgaaatggttattagaatgtacttcctgcagttaagtattgtttgataatcatcaaatttatgtgaaagatcgtacgggataacaaaaaagaatggagtgcgaaagaaattggaatagaaaaaaatactttcattatttttaataaagtttatcttcagattaattttaacatttggttttgaaaactttattttcaaaaactatattttaagaaaaggcaccctgaaatattagaattttagaaatttctaaacctcataacaacacaagttattcagaaaataataatatttaacaacttaaaatgtattaaatatatactagcattttaaaacattaactttttattaaaaaaatccaaagatgtcggggttactttacgttaaatcatcccatctagtaatgaatgaaatttttttagcactctgactaaaccccatgaaatgagttactttagattaaatcattccgtcagacaatattatcattctaaaaaagtattaaaaaatataaaaatatgaatttaataatgcaaaaatttctaatccaaaacacaagtttgaaatcttttaaatccgactgggttgtactttttcagtgctacagcgtgtttgatttgatgttgagaaattaattctgaatatattttcatatatttaattttatgttagagaaaaattcaaaattaattctgggtcaaaataattttgagtgttgatccaaaatttggtattgaattttacttctaacctacaacaaaacatacaaacataaatcatatcatttcaaaattaattttaaacaatatcaattttacaaaattaattttattacaacgctcatacaggcaaatactaagaaattcctcgcctacatttacccttcgttaaatgacaggaaagaaaaagaaaaagaaaaacagatttttaaaatttaagctggaaaaataatttgaaaaaaaaatggaatttttaaaagtcaatagtttctactttccctccaatcttcaaccaaataatgaaacttataaaatttctacaattctttcctcctatttttctctcacgtgcagggttaattctcataatgctccttcagctacctcttgctgtttttttctttttataaacatttcattacttccttgtggatcaacgaaatctagcaactgttaggcaaaatacgaacaccgggaaaggcaggatttaaacaacgtgattcccaaattatttaatcaaaccccttatgtaacccagggtgaaggggcgaaaaacaaatatttgataaccaaaattacatagtagatgagaattttcttgcataataaatttttagtataaaataaaacagcaaagcaccctacactacaggttaccaagacatttgatcttcccttaactactactactataaggaacataaatataaatacagctgcctctttaaaactgcccgtgctgatgttgcccatagagacaagtaatgagccatggcagatgatggaacccgcagaatacagccctcccttttttctcctttttataaatgtttcaaaaagaacatacacagctgagactgagccaaaagtcccagaaaagaaaagaaggccgtagaacttctgtcttctaaaatccttagtaatacaaggattagccaagaaacctgtaagttttagaggaaatgacagacgcaaactctacaagaactaagccaccataaataaggatggtgcatttttttatatttatgttaattaagttaaaaaggtcttctattgttctgattactaccacgagaaccaccaaagccactaggctcacctgagccaaaatctccaaaaccacccgaacgatctgaaccaccaaatcccccaaaatcatctgggcgaccaaacctagacccactggatgatccgccagatctacttcctgattgacctgaaccgaagccaccagatgatccaaaacgaccagagcttggtccaccatatctattcatttcaccagatgaattaccagaaccaaaacgattataattctgtccaccaaacctttcaccggaatttccaaagctagagcggccagaaccagggttactgtagcccccagaacggccagatccaaaacccgtatcaccatatcgacgatccctggtacctccgaaagaaccaaatcgcccaccacccatgccaccacccatggccactgatgcactatcaacagcaatccgtggtagctgataaacacaaatataggaataaaaagcaatcaattaatcattataaataaataaaaaatactgtcctataatgtaattagcatagagcaaacatcacagtataaaaaaaaaaaaaaaacagtagtaataagtaataactgtaggatagtagttcacaggcagcttagatatacaagagtactaaagaaaattaagattttcagtaactcaagttttaccagtattagttgcaacctgccaacctgactcgcaaactaataataaactatttcggcaagtctctacatgggaactctaattgttcaacatcaactgctttaacttgggattccacaggtttaaatctcattgtgcacagtaaggatgggatttaaggcaggaggttgtgttatccttgttagtaattaaaaatagattatcctcaatttcaatcacgagaaaattactaattaacaagctacaatttccagtaaaaagggcagaaattgataggatgccaggagatcacctctgtaaatctactgcccacatcacgctcaataagcttaacagccctcgattgatcttctgtatacaccagaatagcagttcctttcttaccagcacgacctgttcgtccagaacgatgaacaaatatctctgaattgttgggaagatcataatgtattacctatagaaggaaaccaagttaaaacttcacatataaaaaattgaataacatggtaataatattttctatatgaaagtatttgcatatgcacatgacatgttaaacaaagtaaagcatagaatattgataaagaccgcaaaatacaaaacaataacacatcaagcaacaaaataaaatctgaggtccaaaatttatagaaccacggacagaacagtggcaagaatacacctaaagtattgctcgattgctaaaaagtaagaacggacatttaaagctctgaaagcagataagaatgaacgatcagatgctaaaatatgttgttctatatggaaacatacctaataatatcatcaatacacagaaagcatacagcccatcttttgaaaatgcatcatttgttttgtaaagcaaatttgctcaaaaaattaagaggaaatgcagcatcataaatatcagaagctattcattgatttcaacaacatactagctatggccagaacatctgatgaaaataaatacaagtcggaaatgtagagaatcccactctaaaaattagagaaaattctaaaaagtaatcaatcagagacaagtgagttatcatatgcgtaccttgtccttacataagtaattaatatctcagatacattgagaagaaaacggtaataataactgataagcagcataaaaacccatggaaaaataagagttttcttgcaattcaattaacaataaacacaattccaatgggtcagccaacttaactatttcaaagaaataaaacaactcacaagatcaacattaggtatatcaagcccacgtgaggcaacatcagttgccactaaaacattgaaatggccatttctgaagccagcaagagttttctccctctgagcttgtgatatgtctccatgcaaagcctcacatttaacacttcttgccatggtatatgataatcgatcagcatcacgttttgtttgagtgaaaacaatacactttcctccttttgcatgttcctaacaaaggatatatctttaggagagacaaaaaaaaatccagcaagaagtttccttaactagcttttctaaataaaaatagggtttactatcattttagtccctaaactttttaggatttttgttttcagtcctgaattttttttttctactgatcaacatccattgacttttttctgtccttacttttagtcacttaacatttttccatccttatttttactaaaagtcggaacggaaaaaaaaaaattgagggactaaaagcagtaaaaaaatgttcagggattaaaaacagaaatcctataaagtttaggaactaaaaagatagtaaacccttaaaaacatataaaagggtgacccagtgcacaaggctatacctaattgggtctaaggagcgtagatgtacacagccttaccacctcaagcgaaaaggctgtttctagaatttgtacctgtgaccttcgagtcaaggcgccaaccctaccattgggccaagactcacccctaaaaactatggaaaataacaatttttttcaaaacctacttcttatgaaacagaaatgatagtaacaatcgttaatcagaagaactagcgatcaagaaatgatggtttcagaaggcatacggttattagaggtgaaagaattcccgctttaacatacaaatcagttgcaatggagtacagtgaaattccatctgccaacttctgatcagaatctccaacctacagcaccaataagtttccaattaaaaagtaactatcatgtgctcacttgcgcatacatgcacaaaccatatgtacatttagatattataaacttatttctcaatgaggttcatgtgccctacaacttaatatactaggtggtgtttctacattatatttttttagaggagtcatattccagttaaataaacgatatctcggaattgcaacagcttaaaggcattctccaatagcctaaaatagaatttcatactcacaagatcaatggtcaggggattattcaggtaattgcgtgaaatctgctttatccaagatggcattgttgcagagaacataagagtctgacgttttgggggcaacctctccaagatcttctccacgtcttcctgaaagcccacctgaagcatctgatcagcttcatcaagaacaacaaactgaacatccttcaaatttagagcacctctgttgagaaggtcaataatccgaccaggtgttcccacagcaatatcaaccccataatcaagttgcctcatctgccgagagatgggtgtacccccataaacacaaattgtatccaaattaggtgccgattcacagaactccgcttcaacctgtcgagcaagctctctggtcggagccaaaaccaaagccaaaggatccctcccccgcctgccacatcaaccacaaaaaaacttgtacagttaaaaaacaaatcaaggttttccatgattccatccacaccaatatcaattgcatagtccacctttaactcacgcagagaaaaagttacaaattcaagtaatagcgaaacataagcatgacgatatcattaaaaaaaaaaaatagaactaacccatgcttagcattaaactgaatgaccttatccatgatgggtatcccaaaagcaagagtcttcccagttccagttctagctcgaccaatcatatcacgaccttgcatagcaggttccaacacagccctctacaatttaacaaaataattaattaattaaaaaattaacagaagctcaaagttactaaacatctaaagtctaaactacacagggttaattatcaaccatggatcatattatgcaccgacgagtaaaccctaggaagcaaagcaaacctgaatagggaagagcttggtgatgcctttcttggccaaagcggagactatatcctcagaaattccgagcttcgcgatctcgaggccttcgtcagcggcgttccctttggagctttcttcgtaagggaaatcgtcgacggcatattctgcgcgatgacatgaagaggagcggaaattcaaggggccagcgttagagtggaaggttctggaattgaaggccgcggagggtggccggaagtggtttccgacggtggcggtggaggtggaggcggagattaaggcggcggggaaaccgcgccttgagagagtggaacaggttcttctgaggattgcggttaacatggtgtggtgagaaaatggaaacggaaaccctaaacactacaattcggggtttagggttttatgagaatagaatatggaaatggaggagatatttggcgggtgggacaatcttctgtatgcgagtcttcttactgctcccgtgcgcctattgcattttttttcagatgaatttgtggctcttgatttatttatttttaaattagtctcctaatttaaaataataatagtactaatttttcttatttatttaattcaaaacatgttaattctttcaacaaaatttatcattttcttagcactatttgaacttttttcaatttattcaagagatgaaacttatttcattaaacttatttatataaaagcatcgagaaccaaaatcatgtgaaaaataaatctcagtgagcaatcaaaaaataatatgatattaatttttaaaaaaaattattcatgaaactcatttttcatgtaattttcattttctttacatctaattttggttcgaacattagttggttttcatatttttcttataaatgattctgataagacaaatttcatgttttaatttaataaaaaatgcttaaataggatttttggttcatatataatataattattttgattttgatcatttatcctttaatttttttattttattgtaggctatgtaaaatttaatacttttgattttaatctttatagttaaataacaatattaactaatgacataataataatatttgtagtccaataaatttagaaatatgacatgccattcactatgttttcacaacaattgatgttgcaatacagaatattgtggtgagtcgcacactcctaaatacacaatacacaatggaaacatgtttaatcaaaagtattttcattaaaaaaaaaaaaaaatcaacaataatagtgtatggacttagctatacagggtgcgaataacaaaggccatcactagacccaataatccgtaatcgcctcacatctagcccactaaacagcagtgaaaatgaagttattattatatataaaaaaaacaatcctcacatttcaatgaaacatatggactataatcttctaaaaaaatgctagaatatatttcatcttgatgaatattggtagaggtttcacgaccttcgtttgtaacagtaaatgtctaatttgattttcaaaaattcactcaaaataattcggatcatcatgcatgtcccctgacattattaattccttagagaaaatgcacgataataacttataagtgttttttaacctcaaaaatatttgtctcactttaaaaaatcaaaaccacacacacatataataataatatgtcccattttaaatatgtgaaaattataattttaaaatatactattagagaaatactaatcacgcattttacattagatcgtattagattcggatttttaaattaagcataaataattcttgtgaaatttaaaggacttggaaaaatgtaataacttatataattttctttaaaaaaaattatgatgaagattttatagtttgaattttaaaagatttatatcattaaattttaagatttaaaagaatcttataaatttataagattttaaaaaaattatgaatatttaaaaaatattcaaacttaaaactagtctataaaaaaatctaacaatatttaacacagttgacaaataattttttttctaaagaatgtcaataggatttgattttaatatcattatgtatgtctttcttatttaattattgtggagcatgtatacatattctttcatatcgttatatattaccaagaaaaatatactattaaaaagtgaaatgattaagcttgtaatcatattttattgaaagtaagagtattaatagaagataaaaagttattgattataaatgtatagataaaattgaaaaacaattatgtagcttctaatttataagttaaatgacaaattttaagttagtaacatgtggttttagtttttaaaaatatcttaaaatttcattttagtctcacaaatttaaaatatcttgttctggtctattgtttctagaaacaatattgttaacaaaaaatacttttaaataatcatattttagtttttaattaatttttaactcttataattttttcaaaatattttattaaaatataagtaaattatgtaaataatggaataattaaaatgaacagtataatgttaatttttttaataaaacaatattatattgtaggagacaatatatgagagcttttaataagtaatttactcataaaaatctatccagattaaactattttttttcaatcatcggctaaagtaagaattaaggtttaaatatatctttagtctagcattttttttattcatctaagtttacttttataaatttaatctctaaaaaattgtgtttttaaattttttgtctctataagatattttacttatttttaattcatgtaagtttacattttttaaaattttggactctatgagaatgaatttatgaagactataaattaaaatactagaatctgaaggtcaaaaggactaaaattgaaaaaaattatattataagaactaaaatcaaacaaaaaaaaacttacaagaaataaaattgaaaagacgtcaacttacaaaaattaaaattaaaaaaataaacttacaaaatcaaaaattaaaaaatgtcaacttacaagcaccaaaaacatatttaagccaataattaataaagctttgcaaagtttagtcatgaaactacaagttaaaaaaggtttaagaaatgagtttaatgctcatgcaatggcggtatgaatcaattttgcattgtcattcaatcatcaatcgttgtttgaattactttaagataattattatcatacacgatagattgtgatttgatgactgtaaaaaaaaattacactgtcaatgcataacatttttttcattgaagaaattgggtaaaatagtatggggtttaagaaaaaaaatgcttatgaacatattcaacccaaaactatttaaccaaactaattaaactctgatccataaatacatcatgaaaaataagtattgggttcattatgatatccaaattcttgttaagttggaatgaaactatctttgtcatagataaacttgtttactttagtcaaataaacttataatcttgccaaataagttataaattactaaactagttaaaattgtttatgaaagatgtaacatttttgtgtaattatatgtattcgtgttttaaagtatgtaaatcacactatgactttatttgatagaaaaaaattagagaggatatgaagagatgaaaataagtggtttgtttggtagatatgattagggtggaaacatttataaaaattgttgaactcacttgtactattttgactcatttttctatttttctcttcatttattttctattatcttcaaccaatacctttaatttttattttgcttctcacgtatttcaattcattcatttttttccatctagtatttcatatttttttctgtttacgaaacaaggtgtaaggatgtgttttgatacataccaaagtataccataaggaaaacaacacaaaacaaacatttaagttatatgacaagttttttcctttgcattgtttgtggatattggattacatagtcaaaataatgtgaaatttactatattgccctttttaacattaattatcttaatacaattcatattaataatctattcatcttaatacggatcaaataaatattaatgatcttaaagatgattgtgatagtaatggcaattggggtaacaatgacgacaaatggtgttggcaataacaacaatggtggtgtgatgcgttgcatttagtctttaattatgaagcattttagttaggattgcttgctttattggttgtttaggtctttgttttttgtttattgcattgcattttattcttttttgttgaacttgttacgtcgtgggtgttttcatgtgtacaggagccatgttgacttggcctttggtgctaaatggatctttcctagtgcatgttggacttttaggatcaaacttgtccatcaaggacctttttggaaggaaaatatagctatttgtgaatggctccatctggcacgagtgtgccaagtccattatgtcgcaatcaagcttttatgcatctagcacgaacgtgtcatttagtggcatgtgcgtgccaagccctttatttcttgatcaggttgttgacacatttggcacgagtatgtcatttagttgacgacttattttcttatttttgtgctttttagtgtatttggtctgaacaaattttagtttgtctttaaataacttataaaaactttgtagaagggttttgacttagagattaacgacttaaatgagcttttgattttccttggcttttcttttctcgatcaatactttgtagcccatgttcctgatgatcaagtttaatcctgaaaatccaacatgcactagaaaagattcatttagcattgaaggtaaagtcaacatggcttttgtaacatgaaaacacccacaacataacaagttcgacaaaagaataaaatgcaatgcaatgaacaaaaaaatagacctaaacaaccaataatgcaaataatcctaactaaaatgcttcccacttaaaagactaaatgtaacatgtaacaccccgtgtgcacccggtgtattatcattgtataatagtcagattagcgcttaatcagagttaattaaaacctttttaaaatatagcggaagcataaaaccaaaccatatttcttgattacattatgtatggaaagcaacccacatcaagcatcaacaagcccctgcttaaccagatcatacaaccaaaccataggcagataacacagatatctcaatgatataaacaggaggaagcatacacatatctaacataactggttatatacaacatcatctgacacccgaggtgtctacaaaagaataagcgtccaacgctttccgatcccgaggatccttcctcacacgagggcatacatatatataacaaaatacaactcaaacacatgtgcatacacatgtcttccctctacagggtacaaaacacaaccaaaagccgagacgagctccaagctatccactgctgcccaaggccaagcaggtaccgtctctactggagcctcctgccctgagactgcccctctctgccagaaacatcacctgaaaagcataagccccacacggggtgagataaacatctcagtaagctcagggtccttggaggcatctcctccaccctggctcactcaccatgacacacgtcatcagggtatcacaaccatctgggcctcccggcctctcataacaacacaagcaagctatctagctctatgtatggcggaccgagtcaaacgccgacctcagtgtgaaaccggaattcacacccgtgccatcccatcgggtgctaaccctttacgcatggacgcacgtatatggtacctccgagaataggcaatcaaccgcgacgggacacacctatctcttggtcttagggaatctccgcatcccgggaccgagtcaaccatgagcaaaccaaactaggagttgcgctctctcctagggaggtccatatctatcttaactggccagaagatctatcaacaggtatcatacacgtacaagcatagatacaggcatacatatcattatgagtaatgcaacaaccatcaatgcatgcatcatgaatgcgaccatcactccctcggagtatggtggaacacagcaagtgggaaacatccccaagggaccaagaacttacctggcaaagccgagctctgcagttcttccctcgctctgtggcccacgccactgacacccgcggtgtcacgccctatacaaggcacatacaacataggtatcatcaacattctatccgtacaaggcatatatctctagtaaaacatacggaaaagcataaattgctgcataaaaattctgcagattttacacccacttggaaaaatcataaatccttgtgggaagctcctaaaatcacgagaatttagaggcatcaagatttgtctcttatcttttaaaccaaactggtttcatcaaaaaccatgaaccacagcctctgcagcaagccaaaaatcagaactgtcacacaccaaaatagtgctgacagcaacagaccaactcaagcagccatctttcgaggactacccacaccaggttacccatccaaatgagctgatattttacaggcataaatttcacatacccatcttactatagccactggaatcactcgatttggatcatcctagacaaagttatgctttctgcaaaatggccctctgcagcagaaaaatctgctaaaaacagagtataacagcctgttataactctgcaccataatttctaggagactccaaaaatagcacgaaaattctagagccaacctaactctcttagctttcaaatggcactggtttcataccatttgggcaccgatagcccctgttatgggcaaaacaccagaactgcccaaataggtgtccttagctgtcatgaacttgcatgcttgatttaagcatggaacaccatttcaacttaaaaacaacttctacccactccaaaacacacatcaaaactgtctcaccctcctaaaactcagcatacaataatctcactccaaccctaaccctaacctcaagaataaaggagaaataagaggagatttcaaaccttagagttcaatacaccaaaatagagggtagaccagcactctacggcttccaatcacggttcagcgacgccgaacgagaatgggcagattcaaaatccactcttctctccaaatcaccaacacccaaagctcaaacacaacaaggaacaaagaagagggctttctttctcacttgttttgtgatttcaaccactaatcacgtgaaaacggcaagaagagagcttgggagtggagagaaaatcagaggagaagaaaagagaaggagagaatagcagaaaacgtattctgctggtttttaataagaaaaaggggtgcgtccagcaactactaactgcacccgtacccctaacaaagaccaaactgccctttcgtgaattccgtttagttacacaattaacatccaaattgccttaattaaatttagtgatattacataacacatcaaacaaccccaaacttagagatttgtttgtcctcaagcaattatcattagcaaaagtttttaataaaaagattcatcatatcataactcaagtataagaaaaagcaacatataaccattattacgcaaataatcaaataaagtccaattagaggctcatcctccaaaactaataattgcaaagacaagttcactcatctcacttcactaaggtgttttaggataaaatcctttttacttaacttctcaatgcaaagtgccctactatagtttgggtatagaacctcatctccactagtaaccaaataaacacaagcaaatcacaaggtctttaaagagatgtaattgagttagaggttataatgacaaggtaagaaaatcaaagaaaaggaaaaataaaggactcttatgtcatctcaataccccataaagtttagacattaggcaatatcacaagcagcatttccaatgttacatttttttagttcaattccatgcttgccaaattcaattattgttctcatttttttctcttaatttttttttctttctattttcaaacttgattttttagagcatttaacatttgttttttcagtaagaataatttataatttactcataattcctcctttttcacatatttagccaccaagttgtcacatttttaattatggtaacgatgatggcgtaatggtgacaccaattgtgatgattctaacgagggtaatgataacaacaataacaataaaattggtaatgacatgaatgatgatgataacaatggtaggggtggtgatgacaatgataatgttataaataacgataatagtaacaataatgatattgaaaatgatgtcaactataatgatgagtatgatagtaatgatgatgacgatgatgaaggtgataacaacgattatagtgggagaaagaaaatataattatcaaattatgaataaaaatgattatttttgcttgttgaagattttgtacttggaacaataaattgtcccatagcttaggaaataacaaaaaaataatttttttccttgtgtccatcgtatgtaatttgtcataccctaattcaaaatttaaaatcttaaacgtgttatctagcgtgactagctgagctggtacacgcaaatctccatctatagacagagggctcgtaaactaggaatcttagatgggacaaataagatttctctgcatatcaatatcgctgccattatttagcttctgcgtccgtagtggccagtgccacgatccctttgctcagtgggtgagatcagataaacatgaggtgcgtgaaaggaaggtctaaatgtgatttttcaatttagacccgtacccagtgctgtttttgctccttatatataaataacaattattcatatgtattattatcccattgcacagcagcacaggttagactagaccactttggaatttattatacattatatgatgccacgaaccttacccaattggaaccaagattaggacaaccatcttccaaatcttcaactgaagcagaaagtgtacctaaactaaagtacttgtttttagtggcttaatgctagaaatgggtcctaactccactaccccaaaacaaaacaaggaattcccagaaatgggaccagcatgttttccaatcactctgaggccccaactgtcatgccttcaatttcaaccatagcaccctcccaatattagcttcccctgccatccaattggtcatcaaaatacaattatggtaaaaagaaagattcaaactggtccacattttgtagcgagaaatttacatttttgaagagatcaatatgatggatcccaacatggtctcaaaagaagaatcgatgcctttgccttttctttttcacgttagggtgtaaagcgaaagggttaaaagaggctgcgaggctccttgtagaacactgtaccttttaaaattattataattattacagtttaacaaacatacattgtaaagtttttcttttattaataatgattgacacaaatgataatgatttatatctcttaattcaatggttcataattcaaatctctaccttgatataaaataaacattgtactaataactagttagaaaaaaatcaatatataagtttttatattgttaatcaataaaaaattatttttaatataattttaaaaataattattataaaaattaacaaatttatcatcttagttattagttcatgagtacatgataatgtaaaaaatatttatattttttattattattatacgatatatagcaatgtactttattcttactgggggaaactaaatacaaagaaagaaaggggtccaggggaccaatggtatccacctaaaaagaaattaaactgttggagtttatgagctgacctaggttgctttcttgcatcctcatgtcctcattattaaatcatgaagattgtctcgttcattacatctatacctggtctgagttggctgccactcaattcatatacatcaatttttcttttcctattttcattttcatttttttggggaggggctgactaggattgggaagtgggaactaagatttactttctcaaaaccccagaaagagaaaattgaacatatgtttctaagatttactttctcagttcagcaattgggatctaacatgtattgattggtatgttgatggcctgatcctgatggtgccaagttctttaaaattacattttgatgtggctggatcaaccatatcatatactttaaatttcattcccttttcctttttcatctgtcttttttttttctttcttccttttaaatcattcgtgacggaatttgcggagaaggacctcgatcgattttaaaagatgattcctaacttcatcttctgattgagcataacaaacatgaaaacaactttttttctttatgattccttgattttaaattaatgatgcgctaaataaacttttggacatgccaaagtgaacacgtgcttctttaatgtgttctgattactaacatgaattgataccctgataattgttttctcttttcatataagcatgaaccgtgttatgaaacatcaatggtatttcgaattggctgaataaagctagccatatctaatattcatgttgctcagaaatttctttctccttctatgcataaagctagccatatctaatactcatccatgcaatgttatttctttatctattttcatcacatcaactattttatcacgccattcttgtacacagagaaattatataaatacaatttctgttagtctcttagagatatgccttttttctaaaaatcattcaggtgtccttattcaataatttaagcctatgaaatgaaatagatgatttatgacatatagtacggtagcttctatgaccatatatatatatatatagagagagagagagagagaggttaatcgttgttatttctcatttattaaaacaaaaattaagttccattcatgacacccccaccacattctctttttcaaaatccagaaattaataaaaaaagaaaggtacactcagcatgcacattgtatcaatttattctcccccatgattggtatctataatatggtctacgattatatccccatcatccaaatctgattcatcagctgctctggtggaattggtttatgaataaacaaaaaaagaaaaacaaagaaagaaataaaaagctaaaggaagtggtgcttctaggctcaaaaaccgacagaatacaaataaaatgaataaataaataaataaataaataaaatttaactgggttgtgaaacggtccgtggttaagcattttctatccaaacaccgcttttgctttttaaaagctagagatgacaccaaagtagtgtgtgtatgtatgtttgtgtgctgagaaaagaagagagggaaaagagaagaggacataggatgctgtaacactgttacctctgagctcttaacattacaacacataacactcctcacacactctctctctctcttaccacctgctacttcatattcagcataactctatgatattgttgttattattccaactgcatatccttaacttctaagctagttaatcccaaaaatgggaactgtaactcttggccttgtacttgtactcctccttttgtggttaacttggcctgcttctgtttcttctcttcccatgtctttgagaaggcaagcctctatcttggtttctctcaaacaagactttgaggccaacaccgattctttgagaagctggaacatgtctaactacatgtccctttgcagtacctgggagggtattcagtgtgaccaaaagaataggtcagtggtgtcattggacatatccaacttcaacatttctggcacactttcaccttccatcacaggactaaggagccttgtgagtgtttcacttgctggtaatggcttctcaggagggttccctagtgaaattcacaagctagaattgctgagattcctcaacatatccggcaacacgttcagtggagacatgagatggaaattttctcagttgagagagcttgaagtgcttgatgcttatgacaatgagttcaattgctccctccctcttggtgtcactcagctccccaagctcaatagcttgaattttggcgggaactatttctttggtgaaatccctccaagctatggagacatggttcagctcaactttctgtttcttgcaggaaatgatttgaggggtctcataccacctgagcttgggaatctcactaacctgagacagcttttcttgggatactacaatcagtttgatggtggaatccctcctgagtttggtaagttggttagtttaactcaagttgaccttgcaaactgtggcttgacaggtccaattccagctgagttgggaaacctcattaaactagacactctcttcttgcaaactaaccagctcagtggctcaatccctccccaattaggcaacatgagtagcctgaagtgtcttgatttgtcaaacaatgagctcacaggagacatccctaatgagttctcaggccttcatgagctcaccctcttgaacttgttcatcaacaggttgcatggtgaaattccacctttcattgctgagctgcctaacttggaagtgctgaagctttggcagaacaacttcacaggtgccattccatcaaggcttggccagaatggcaaattggctgagcttgacctgtcaacaaacaaggtcactggattggtgcctaaatctctatgccttgggaggaggctgaggattttgatcctgctcaacaattttctctttggatctttgcctgctgatcttggccaatgctacacactccaaagagttcgtttgggacagaactatttgacaggatcaataccgaatggttttctttacttgcctgagttggcccttttggaattgcagaacaattacctcagtggttggcttccacaacaaacaagcactgcaccctctaaacttggacagttgaatctatccaacaatcgcctatccggctctctaccaatttccattggaaactttcccaacttgcaaattctggtgcttcatggaaatagattctcaggagaaatccctccagatatagggaggctgaaaaatatactcaagttggatatgagtgtcaacaattttaaaggtagtattcctcccgagataagtaactgtttgttgctcacctatttagatttgagccaaaaccaactatcaggccctatcccagttcagctttctcaaatccacataatgaactatctcaatgtctcatggaaccacctaagccaaagtcttcccaaggaacttggggccatgaagggcttgacttcagcagatttttctcacaatgacttctctggttcaatacctgaggaggggcaattctcagtgtttaactctacatcctttgtgggaaatcctcagctctgtggatatgagctgaatccatgtaaacactcttcaaatgcagtattggagtcacaagacagtggcagtgcaagacctggagttcctgggaagtataagcttctctttgcagtggcactgttggcttgttcattggcatttgcaacattggcctttatcaagagcagaaagcaaagaaggcactccaattcatggaagctcacaacatttcagaatctggaatttggaagtgaagacatcatacggtgcataaaggaaagcaatgccataggaaggggtggagctggggttgtataccatggaacaatgccaaatggagagcaagtagctgtgaagaagctcttgggaatcaacaaaggatgttctcatgataatggcctctcagcagaaataaggacactgggaagaatcaggcacaggtacattgtgaggttgctggcattttgttcaaatagagaaaccaatttgcttgtttatgagtacatgccaaatggaagcttaggtgaagtcttgcatgggaagaggggagagtttctaaagtgggatactaggctgaaaattgcaacagaagctgcaaaagggctttgctatttgcaccatgattgttcccctctgataatccacagagatgtgaagtcaaacaacatattattgaactctgaatttgaggctcatgttgctgattttggacttgccaagttcttgcaagatactgggacatcagagtgcatgtcttccattgctggttcctatggttacattgctccaggtacttagttttaatatttaaatatataaatcaattagtctacaatatgataactacttctagtagatttatattggttacatgcaccctaacttccaagtttaggagacattgttgcttggctccccaaaaaaggttgaccaagtgaaatgattgaggtcaaggcctcaagggttttatttttatttttatgcacaatgacaacagttaagtttgaacttagaatattgtgcaaattatccaaaattttcactactaggccaactgcagtgggttgggttaataaggtcaagggatatcaacagagatgattatttcaggtccatttaacaatcaaatattcatagtaaaaaagtcaatgggaatagaagaattaatatactattctgttttttgttagcacaaaaatattttatttattttccctgcatgtacgtgaatttctagatcggtcgaaggctccactaacacaggaaaattctttcaatcttttgcttttcctcaccttaactgggtttgtgcttatgccttgaaaccataaacccgtatacaaaccaaagccaaccacaaccatccttttttgactaacatatctataagagccaccaaaagcatatgcttctttcatcaaggcaccagattgagatctatttactttctccaaaccccagaaaaagaaaattgaacaatttacaggcacaaggcaccactaacttgtcttcttacaaatttaattggttaacttgaaaattaaaaataaagcttttcccttgtttgtttataaaactattaattagccagtcttttacatcatcatcatcatcatcatcatcaacatcatcatcatcatcatcatcatcatcatcattatattatatactcaaactcttttttcctcaacaatgacatttatagtactgtcatatataggcataggtactttaacttttgagctaaaatgtgaaagccaacaattatggtgtactgattttgattcatatatcacagaatatgcatacacattgaaagttgatgagaaaagtgatgtctatagctttggagtggtgctgctagaattactaacagggagaaggccagtggggaattttggtgaagaaggtctagacattgttcaatggaccaagttgcaaacaaattggagcaaagacaaagtggtgaagattctagatgagaggctatgtcacattcccttagatgaagcaaagcagatattctttgtggccatgctatgtgttcaggaacaaagtgtggagagaccaactatgagggaagtggttgaaatgcttgcacaagcaaagcaaccaaacgcattccaaaagcagtgatctactaccaaagaaccaaaggaaaagttaaagaacaaataaaagaaaaagccgactctatacatgtgccttgcatgtgttaatgttgtcggttggtaaagatgtcaattttcctaactagtttgtcatttgagttttaaaggttttctttttctttttctctttattaacacttagttgtgagaacaagagacttgcatatgttgtaggcatactggaaaatttactatagttggacaatgatgctaaaggggaaagggaattaatgttgatagtacctcaggagtctgtacaatatatgggggttggagttagattccttggttttcgtttactacttgcttgtaatattctaggaaatatttatcacctgcataatgaaatctaggagatgtcatatcagagtacatttttctttttccctctgctttatcataattcaagtgattttggtagggtatgctaaaattttagaaaatagattttgcatattgtgacataatttaacagtagcatgtaaaggttttaaattacagtcatgattgttttgtaattttgtcgaaatttttatgttgtgaatttttttagacaaatacgactaacggagctacaattactgttgcattgcaattgtgaagacttcataaaccttaacattgtagtaaaaattgcaattatggactatttttcaaaaccttgaacaatcacacaatttaattaagaaacaacagggtaaataaaatagttttatactgtaattttacaagttatcgtttgcatatttttaagataatttttaaaaatttaataaatttatcataaatgataaactatgattcaacgaacgataatgtaaatcaatacataatcttttttctcattaaaaaatatcttaagatttgttttatttgaatcaattttataatcttgatgcatcaccataaagagagaaaaaaaaattctatacatgatgactaggaataattagtcactaactaggatttatcacaattataaatgttacattatttaatgtgacgataattttatggtcgaattagattggaagaggacttgcattgatagagctgctaatttcaggtaatccaagtcatcatagtccaacatatttttacatcaagccaagttaatgacagaccaaattttttctaactcaacctagtcttggcatttgaattctgcactccatatgtttattatgcactttccaatttgtttgaaaataccaaacttactcccgcgatgacatctccttcacccgcaatgataacttcttctctcacgacttcaccttcttcacgacagtctcacaacctccatcccacgagtcacgacgccgcagaatgtcctcccccttctccttcctttgcgcatcaccatttaaggtaagaatgcaatctggaacatggtattttgtcttctgaaacaacaattttgtaatttttttattttcaaccattatgcgagagacatgattccagaagttatataatagccttacaaaatgaccatttcggaacatagattatttcagaataggctttccggaatacataaaatattttttactatattatgtaataggcatttcggaagttatgttttttactgttatgaaatacgtattttagaagacaaaactatttttaatgttataagatgccgggagctatttttttattgttatgaaacacctatttcaaaaggcagaaactattttttactgttataaaacatctatttcgaattttttttttattattataaaatacctattatggaaaagtataatatgaagaggatagtttgaaattttaaattttttgggaggtacatgaatcaaatcacccagggccggttctgggcccattcaaggggcccaaccgcacagggtcccaaaaaataagaggtcttaaatattaattactgtaacatatgttcaatattgaaaactaaaggagatggtaatgcctatttttaataatcaaggggtccaaggttcaattcccaccaacaataatttttactatttttaattatgattttaataattaattttaatatttttttatattttctctttaaagtgaattttataatttaaaagagttaaattcaatccatgaccttttaaaggaaacagtccataagaaaaaaatattattttactagttacttgacggccttgaagcccacaaagagttgcattgggtaattgcttcctgcatttccatttttgcttcctctacctcccaaaatgacctgatgctttgctattccggcccatttttctaagttaaccttcaacttttttaaacaaaaatacctttgatggaaatatgttgtcatatttatttttaaattgtatttcaatggtttaaaataattatcaaaaagaataaaattaacctttttttataatataatttatttagtataaatttaaaatataatttatatgttcaaaatatttgtttattatgaatttaaattataagctaatttataaatttaaaatatttatttatcttgtatattgtacaaaataaaatcctatctatcttaaagtaaacatttatttaatatgtttcacatactataatattaatattattttaacattaaatgaaaacataaatatatttaatgtgtaactgattgaacaatctaattaaaaattgttgagtaagtttttattatatatattaatttatccataattgtaattataaaatttactaaaataattttaaaaatatttcaacgttctttaaactaattgagataaactaaaaacatatataagttataataactagtcatttttttttgtaaggtttctgactgctttggaccctgtcgtgggtgatttgcgttgtaatgttttttccggtgaaagttaattgattatgggcctgggagctgttttgccctagcccattcagaataaaaaactcatctaaatatatccttgataaattgaaaatataaaattcttcacgattttttattttattttataataataaaatgaaaaattattccatttaaatgaatattaaaccacaattataaacttaatttgcatttttaatcttaaaatatgctcttatattatacacctgaatctcattagttttgtgagttatgctttaatgaaaatgtttttaggttatatttttaggaattctcttaaactaaaatgtttttagaagttaatatcattattctcatcgagtcacatgtttttttctttcttcatctcatgtattaattatccacccttacaatctataatttttatatttgttgaattaatttaggatgtatttttaggagttttcttaaataaaattacttttagaagttacgattactctggtcgagtcacatgtttttatttttaatctaataatatcttaattatctagctctttcaatttataatttttaaatttatttttaataattttaaagcaattgccagtagttaaaaaaaactgtataaaaattaaataatttatcgtaaatttgaaatctaaaatatttatttatgacacattttaattatagttttatatattttagaaatatttatttattataaattttaattttattatataaaaatgaatattgaactttacgattccgcaaactaggttgctaattaaaatttaaacattaacattttataaagaaaatatggttatatttaatttcttgcaaatattaaatacaattaatatttactataaaatttaagtaaactaataataaatagttataagaaaatttagaattattcagaaataaatacgaatttaccttaaccgtacaattcaatgaccacccaacatgatcgccacgtggactcgtatagttggttacactcaagagccaatgccaccatgactcatgaggcagcggaaattaaaagaattaaaaaaagataaaccaaagactgaaactctgaaagagtgtatataaaaacgtttctccaaattaattaaaaaaaaacgtttctccaaatataaaaaaaaaaacaaaaacttttttcctcacattattaatatatactattctccgtgtgtctctctctagagtaaaaaaaaaaaagggcaaacaaaaagactctcctccccctttcatctgaaaatcatcgtcgtttaatccaaatcgcttcgtcgtttaactctctaaatcggaagttaccacccgctgccaccgccaccgccgcgctcggcgaatctctccgccaccgccgcttcttcattcgaatctcgctccaccgcgattcctgaaacatcaactgattcctctgtcctttttactctctcttttctatacttttgatattcgtagctggcgattccgtttccggcgagtccttatcgaaggaagagcgctcacaattattaacctgcgcaccgtcacttgtcgcggttccttccgttcgaactaaattgccggaactctgttctgctatctgcacgtggaaaggtgagagtcgttcgctcgctcttgcttgcatcatcggcgcatggattcgctcattgcttagtgattcggtttcggaattagggttccgatttcggatttaggtcggttatttgttccgaaggtcgcgctctccaagccttaagggttttagtgacgagcttcgttcagtttgctgctcgatccgttgctttatccctttcgattcggttttgccgttgcttttcggagattaacttgtttttgatatgatgctgatggttttgtgcattgcacggtgttgaaattcgattttggcgaaatacgagtgttaacggaattcagttttgaccgttaaacttgacagtcgtttgaagcagtgcttacactccttgatcaatgtggttcattcgtgaacttaggataatgcatataggactgtttttaacctagaatttgaagttgaaaccgaatttgccatacctggtacaagttccgcttgaattgaacctggagcatggttttgttatttcatttcaacttgcacatctgctagagaatgtgtggaaataaatagcatgggaattttaactcacttgttaacctgtggtttgtaaaggaattgcaactctatggagtcactgatgattgaacacttgaacctgctaatttgtctactaagagctaagcatgtttggtggttttgtaagtatgtatttgtagaagtgttgcagaagatgtaaattggtttgatgcttttcctctacgtcttttctaacttgctggatggttgtaatacgggattctatgttgttatttatatcatcaatgtgtgatcaatggcatgagctgggcatcattcatgattctattgatcgtatatcactctttgtttttcaggtcttggggactggggagacagaagataactgaagcagcactggatttttgtcactttttttttttttttttatgattagttgcatccacagtgtggagattgaagtaaagataacagtaagttagtcatatgttacaggatggctttctttaggaacttttcaaatgatacagtctcacatggtgtcatggaagataaaagccaaggacagaatgctaatagagttcatagatcagtaggtaatgattgtactgatgcaacttctagtgagaaagaatttgatatgaacatggaggcacagtatgagagtgatggtgaaccagatggttccagtagactgcaaactgaggcaacagctgacgatggggatgctgtgaaagaatcaaacttgcagactactggtagtaaaacagctatggtcggaaggtggggttcaacattttggaaggactgtgggcaaatggaccctcaaaatggttctgaatctgggcaggaatcaaaaagtggatcagattatagaaatgcagatgggtctgaagataattcattggatggaagagtgggaagagtagactcagatgatgatgatgatggacaaaaggaggcaggaaaaggtccaagaggtcactctgatgttcctgctgaagagatgttgtctgatgagtattatgagcaggatggggaagagcaaagtgactcattgcattacggtgggatcaaaaagcccactggatcgaattcatggccacaacggatgtcgacctctgcaaatagaactttgcataggaattcaaggttttcagatgatgttgaagataatgatggtgaagatgatgatgatggtgatgatgctgattatgaagaagaggacgaagcagatggtatgtcgagcattttatttatataaagattgtttcttaagtatggagtactgcttttaaaatagctaatgtttggcctttattacatagttctgattagtgaagaacaactgtgattttttaatgttaacatcgtgcagaagatgatcctgacgatgcagactttgagcccgccacaagtgttcatgctggaaacaaggtcatttatttgtggttattgttgttgctgaattctatttcattaatggtcttttatctagtaagggcttgtatatgttcattagaggacaaattttgctttactgctagttttgacttttaaagttaatatgtcttggttttttggtggatgtttcctaataatatcaaatggtttaactgttgttattttacaggataaagattgggaaggtgaaggctcggatgaagatgatgacagtgacgaaaatatagttgtctcagatgatgatgaatctttctatgctaaaagacctaaaggaaggcaacgaggtaagattggacaaaacataaaatctaccagagatcgcaaagtgtatgctgcatcaggtcgacaaagaagggttaaatcatcttttgaagccaacgagtcaacaacggaggattctgacagtgatagtgatgaggatttcaaaagcacaaaaaagcggagtgttcatgtccgcaagaacaatggtcgctcatctgtagccacaggtttttctttgcgcaacagtgaggttcgcacttctagtaggacagttaggaaggtatcatatgttgaaagtgaagagagtgaagaagctgatgaagggaaaaagaaaaagtcccaaaaggtacaaccttcattatacacatctgggcatggtttctacctcctatcttttggggtttatttatctactaaaattgaatgttaaatattgattctcacatataagactcaaatcatcatgtcacttcggataacataccctccaaaggatgttttcacttgcatcgcaaatgactactggttagacatttttttcttcttattgattaaaaaaaattggtagtgtattattaggaagttgtgattttatttaacaaggataagttttacatatatttgatgacaaaaaaagatttatttattacaaagaagagagggaagtcactactccattgaaataatcattggatccgagcagcttatagtggagccaaaagcacaatcctaaatgaaattaagctgcagagtagagagacacccctaaagttgcaagtgtacagctccaaccaagtacatgaatgggttgcataaactgtgtagtgcccagaaattttcacctacttttcaccatcaccattttaaacctaacctgctaaaactgttccaaataaggatacatcaacaacaacaaagccttatcttactaggtgaaggttggctccaaattattaggatacatgaatgaccacaaaaaagttgtcccaatattttttatatctgtaactagtatcttatgtccatctacgcagcccttctaagatgtgtgttttatctgtttttgggggtgagtggatgtgagattgcatgatttgaagttcagattttttttttttttttttatcagcaaaattaaagttcagattaatgtttcgtaggaagtggaaggtatgattgaatgcacttaaaatctgaaaataatgtattttctattcctctgtttcagtttcaatgtgatgggaaaaaaaataaaaaatggaattatgttgtgatgaactgatgattgttgagttatctattattttggtgtttcttttaattttcattatttatagtatgaactatcgtgcgtaagagataggattattaaatttattgggtgttttactgaggagaattggaacaagtacactcaagtcttgttttaaatcgtcattcggaaaattgagaatttttaaggatataggaaaggaggtgatgttttttatcctttgtatattgtctttgagtgagagaaaagagaatgattactggcttgaagaaagcttatgaaattggatattttgttttgagtggtatatggccacttggtggagaccattagcttatgtttgtaatttgtgctagctgttctattctttacttttggtgtggtggtggtggagagatctcagttatgaggtttgctgattgcttgacggagttgatgctaaagatgcaagatggtaatttcagctgcattggttttgatgtttgagatttcccaatctatctctctggaaggataatagatttgttagagtacggagtggatatatgtcatttttttgtagacgccttctttaattctagtttattatatctatcaaaaggatcagtgtactttaatctagcaatgatgattttataaggctattaagctttttatattggaatggctttctggtgggagtatgagatgttagttatgctattatgatacctcctatttacttaatatatactttaaatttatttctactgatgtgattcttttaagtgttcttcaggaagaaatggaagaggacgatggtgactccattgaaaaggtgctctggcatcagccaaagggcatggctgaagatgctcaaaggaataatagatcaacagagcctgttttaatgagtcacttgtttgattcggaaattgattggaatgagatcgaatttttgataaaatggaaagggcagtcacatttgcactgtcagtggaaatcttttgctgagctgcaaaacgtatgatatttattcttattgtttattatgcattaatcattgttattctgttgttactgtctttcggtcagtctctgttttttattataacaatcctgcttcttattgtttggttgttttactctttcacatgttgagtttttttttttttttttttttttttttttttttttctggcctaaatttaatacattctgtctttatgtgagattgcagctcagtggttttaagaaggttttgaattatacaaagaaaataatggaagacatcaggtacaggaggacaatctcaagagaggaggtaattatttgagttcagccaatcaatttagatgctccagtttatttaataggtctggaggctataaatactgcagaagtttttgtggaaatttatttggtggaaatagtttatccggaaaagaacattgaaattatttatgttttttaataatttctttttttggttgttcctgtatgcagattgaggtaaatgatgttagtaaggagatggatctagatattatcaaacagaacagtcaggtttgctttcctgcattccaatattttcattactttggtcttgttttctctgatgtattgctatttgctaattggattgtttatttgcattttcaggtggaaagaataattgcagataggatcagcaaagataattctggcaatgttattccagaatacttggtcaagtggcaaggactatcttatgctgaagcgacttggtacactacgctaaaaatttagttatgatttacttatattttttgtttcattttctgtgaattgagtgtcttcatgttagagaggaggatggattgatctctaagcattgttgtacaccaagttttaaacttttagatctttatttagcaagtatgatatgatgttagttttctctgttataaggcatctattctgttttactgattctatgtaatttgtcactcttgatgtactagggaaaaggacattgatattgcttttgctcaacatgctattgatgagtataaggtaagtctctatttcactctattctcattattgtattggttttgaaaagttcggtatgtggttgtagtcattcttcttatggaagttattatccatctcctgtatttctgccttcaattgaattaaacttctggtgctgtgcatgcttggttgagagcagtgctaagaatggttatctcctagggtagttttgggagtttcacatctgaacccactaggaatagactaggcctggttgttgtatttattgcaatgcatacatgttaataagatttatatatgataatttggatattacctatttatcttacagtgaactttttgttctgccatatttgaacaggctcgtgaggctgctatggcagttcaaggaaagatggtagattctcagcgtaagaagagcaaaggttggtagactcctcgacttgtttgtgggcagtgctcttttttcaataaaattcggaacatttcgacagattctgtgtatgcacttgacatggtcgctggtgtggtaaacttgtgttattatcatttttatcgacaacaatatagtttctaagttcttggaattaaattactaaacaaaaagaccaacagtatttcgtacacctttaccaattatgttgtatcactataatttgtttagtgtatcagaaatccacttcggttatgttcatatcacgagggacttctcagtcttgatttacttgattctatttcaaattagggtcatttttttcatggcatgtctgctctattaaatataggagcaggctgggacatgattgaacttttatttttggtatgaattcggtatttctttggaaagccattggactctaggtgtgactttttactagttttatattgtgaaatcttttaggacactttttgtccattctctcattttttttaataaaattgctttgttgaggaaattttatactgtattactccttttctacttagtagattattaaaataattttaaatatgcaaaactacaatttttaattgattacgttaaagataaactttgtagttgagaaaaccttatagatataggtctaaatttttttggtcatttatgtgtcaccattttattctacatgttcttaatatgtaatttaacattgtattagatttttttagaggatgtaacttttatttttcattttttctgtttctgggcaaagatgacgtgtcttatttttattaatatatcagattattaacaattaactttgatctattcattctaaaattgcattttatcattacttaagcttaaatttgagaaagttgatttggagaggggtgattgagaattttttgatagtttccttttatttgtagttcctgccttctgaagcctatttccttttactggttctttggttaattttaataccatataaagaatattttggttcattatttcatgtacagaatatcatgatattatctatgtaagttctgattttaatatttggttttgatgtttagcaagtttgcggaagcttgaggaacaacctgaatggttgaagggtggaaagctccgtgattatcaacttgagggtctgaattttctcgttaacaggtatgcatgcttgtatatttgtcaaggtacgttttaattttttggtgttctaaatctgtgtattgcattttgcagttggagaaacgatacaaatgtcattttagccgatgaaatgggcctcgggaaaactgttcagtcagtatcgatgcttggttttctgcaggtgtagtatcaattctctatttgattacacttgcccttgcaatgtaataatacgtgcgtttttgttccttgcacagaatgcccagcaaatccatggtccttttcttgtagttgttccattgtccactttatcaaattgggccaaagaattcaggaagtggcttcctgatatgaatattatcatatatgttggtactcgtgcaagtcgagaggtgagacatttctgagtttgtcttttaagttatgatttatgaattttgtcaagtcttccatgcttcaaattgtctttctagcatttaatcaccttttccctatattgctatggatgtatacttctctttgatttgcttggttatttcttgctacatgaaaagaaatttaagctatactcagctgagtaagtggatgtggttttgatatttttctttgaatttaagttatgtttttaaaaagcctagacttaaatatgtttttagtccatcaaatttttgggtctatcttttttagtcccccaaattaaaatttgcatttagtccctcaaatatgcgaaatgttttttttagtccctcttgcgataaactgtcaaaaatcagtcaggaggggactagaaaaagcattttgcaaatttgagggactaaaaaagacagaccccaactttgattttgagggaccaaaaaatatatttaagcctaaattctgcaagctttttattttatttatttcttttacatatgattttttgtttttcattttgtggcaggtttgtcaacaatatgaattttataatgagaaaaaaactgggaagccaataaaattcaatgcactgttgactacatatgaagtagttttgaaggataaggctgttctctctaagatcaaatggaattatctgatggtggatgaggctcataggctaaaaaatagtgaggcacagttgtacacgacactttcagtatgtaacatttctcttaatttatttctgtgcaattgtttatgatagagtttaatattttatggcttgttttgtgctaatcttttaggaatttagcaccaagaacaagttgcttatcactggtactcctctacagaacagtgtggaagaactatggtatcattaacattttcctttcgtatttgaattgtcaaaaaaggaaacttacatcttttgtggatttgttggatttcttaatattgttgtatggataaatgttaataaatgctattactgaatataatgatattattaactgcttgatgtgtgacctagtaaatgatgagttatttgtatatcatttacatttacatttacattaaccatttaaagcagcgtacatcatggcatcctccagtcttaccccgcaagggtgcttctagtttgttgccttttcattaggggtgtaagtggcccacagattaggttgaattttgtgtgtttttcaactcaatccaattaagcttaattggattgggattaccttcttttttacaacccaatccaatccaactttaattggattggattggttatcaggttgggtcattaaaaaataaccacatctttaagtcttaaaaaaaaaaaaaagaaaatccttaaactaaaaaaaagtaagggataattttaaaaaactgtgttcataaaacattgtacaactcctgataaatagaaaaagataaaccttaaatatacattgttttacaaaagataagtcaaccaactgcattcctttgttcatttgctccatggcacgttcaattatggttttacaactatggtgatgacggcgagggttttagggagaaacgctattgcggcttgtgagactgagtgactttaagctttagagttttctaatttctatattagtaatttactactaagtttaatttataatatataattagtattttgttatgtttgttttagtatatgctggttgggttgggttgggttttgattgggtccaaaattttaaactatgaacccaatccaattacaattgggttcataaaaataaaatcaatccaattcaatgacccaatccaaccacaaaattctaaactggttgggtcagactaggcgggttcgcggattgggtccgttccgcttgcacccctacttttcattactgtataagtagcatgtatatttatgcaagctcacaaatgcagagtttagtagtttttgggaaactcccttgattgattgtttctcattatatgtccactaaattgatttctattatgtgtgttgtctgttattttgtttgctttggttttcttgtttgtttgacaattcccctcccctctccctccctgttttgtagggctttgcttcatttccttgatccggacaagttcaggagcaaggatgaatttgttcaaaactataagaatctgagttcttttaatgagaatgaggtataagttgtcatggataccctttactttttttctctgcttcttgattttccttgatctcgagattctcgacttctgcctcactgtaatttgatgtgcataaattattttgttagcttgcaaatctgcatatggaattgagacctcacatacttcgaagagttatcaaagatgtggagaaatcattaccccccaaaattgagcgtatccttagggttgaaatgtcgcctcttcagaaacagtaagtgcaattttagttctgaaagttttttcttttggaaaaatactattattgtaagttcactttctaaattcctgttgatgtattccttcgtgtaggtattataagtggattttggaacgtaattttcacaatttgaacaaaggagttcgtgggaatcaggttacatccctttcctgtgtttctaacaatcgtttgttgataacggatcatgtgctttcatcatgatgatggttaattaaataggaaatgccaatacgtggctttgatgggtggtttctttccaccatgcaaacttcattgattgtcaacagtagcaagctagagttagtgcagtttattatttttaagatttcttatttttattgggaaaataacattaaactccgttacactttacttcttttgcaaatagacaccctaaaatttaattttgtctcaattttgcaaatagacaccataaactttaaatttattatgattgattattaaactttaatctttttgtaaatagacaccttgaactttaattgcatttcaattgatctttaaaatttatccgttttacaaatattttttttcaagttatttatcttaaatgttaatcattcattgatttttttttttgttacaactcatttttcatatttaaaatataagaaataatattaattagatgatatatatatatatatatatatatataaaggggtaataataaaattaattttaaaatttccattttattttttgatcctaaattttattatgttttaatgtttggaaaagtttagaaatttcttttttgttggtaatttaattttaatttattttaacacaagattattaatgaaagggataatttttaagaattaattgagatgaaattgaaatttaggtatttatgtgcaaaagacgtaaactttaaggattgattgaaacgaaaatatagttcatggtgcctatttgcagaagagataaagtttaaggattaattgactgaattgagacaaaaagtttagggtgtctgtttgtaaaaggagaaaagtttaaggagcctttatgtttttttcccttttttaagtgaaaaaaaatacagtataaggtaaatttatgtgcatgtcaaggagctgaggtacatttttttattttttttttggtaatattcaattaaagggagaagatattatgaaaataaaaaatacccaaaatgaattaaaaaaaagggagaagatattaaaatgaaatgttgcatctgtttattatcatctggactgacaattcggagaagttttaattcataatgtatatttctatattcttttctcttgaaagatcatcactaatctttttctgctaaatttcaggtttctcttttaaatattgtggtggaattaaagaagtgctgcaaccatcccttcttatttgaaagtgctgaccatggctatggtggggactcaagaagtagtgacaacagtaaactagagagaattgtttttagcagtggcaagcttgtcatacttgataagctgcttgttagattgcatgaaaccaagcatcgtgttttgattttctctcaggtttgttgttgaaaattaaaactggtttactggattcttgatataattggaagcttttagctcaacgatgttccatcatactttttctttagtttagctcaactatgaagtgtactttttgttcagttgcaataaatataaaatgttcttttagttgttttaaagatgatctactggaatgtttgtgtgatcacatttttatgtgccattattcacttaaacttagtggtgtgggatgtatttcaatgacatatatcatattaaactatatatttcggctttttgttattgagcatgctcatttagctggtattgttatctactttaccaggggtaattgaaagaataagttgttcttacgcttctaattgaccgaatagaactagggaaggaaattagattgaattttttttatcagctgtcaatgacaataactctccagttattgacgtgtgaaccattccttaaaatatgttacagtacaagtgttctagtgaatcaattttggtgtctaattgttttaagtccccccacccccaatatgctgaacattgtgtatgtgcatgtgttaaagggtgatggtcgaggaatttttttatctcttacctgactgtttagctttttatgtgaacattgctcttcaagtcctaatgctcaacatttataaactgaaaccaaaaattcatttaattgattaggataaacctactgctgacgaaaatactgattgatctattacagatctaaaaaatagggaaatagtttgatcaacattgttcttcaagacctcaaatcctttgaataatctatgaactgaaaccataaattcatttaattgattaggataaacctaccgctgacaaaaatactgattgatctattactgattgctggtgaacaaatatgattgctggtctctctgaagtattaaatctttcactattgatttaggacttacttcttgtgcataattcatgaacaggtggatgtgaaaatcataaataacttctaacttttgatgttgcttgtctaagcatcctagtctgctttaatttttgaaacaaaagaaatgtgctttaaggattagtgtatgatgattctaacttaacagaggtgtattgcagatggttaggatgttagatatactgggtgagtatatgtcacttcgagggtttcaatttcagaggcttgatggcagtacaaaagctgagcttcgacaacaagctatggatcatttcaatgcacctggtagtgatgatttttgcttccttctgtcaacacgggcaggaggtctgggtatcaaccttgccacagcagacactgttataatatttgattctgattggaatcctcaaaatgacctgcaggtatttagctgatgtaattttattgttaatcaatgaaatggtgcttactgttacttttatgttctttaggcaatgagtagagctcatagaattggacaacaagaagttgttaacatatatagatttgttacaagcaaaagtgttgaggaagatattctggaacgtgctaagaagaaaatggtatgttaaaaatcattagatatccgccggctgtttttgtttcatctctttttctccaactttggcatcctatatttttatgtttaatgtatattttttcctaaaagacattcaattgcttattgccaatcctttaggtcaacaattttatgtcatttttcatgtgaatgtgttccataggttctggaccacttggtgattcaaaaactaaatgcagagggtagactggaaaagaaagaagccaaaaaagggggaagttattttgacaaagtaaggacatttgtgaaaactgtaatttcatgtgaatatttattaccttgctttcatcatttatggactgcattgaattgttttagtttatgcagacttggtttttttttatatatatatatatatatatatatttaataacacgattactgcaccaatcatttgtttctgaaatgacagaatgagctgtcggcaatcttacgatttggagcagaggagctttttaaggaagaaagaaatgatgaagaaagcaagaaacgactcttaagtatggatatagatgagattcttgagagagcagagaaagttgaagagaaggaagctgacggggaacaaggaaatgaattattgggtgcttttaaggcaagatatgcggacagtactgtgaattttgttgtttctgttttaaaattgatttttttgttaatatcatctttatttctctggtttgggaagagatagatttgtatatggtgaggaattgctaagttgtttctctttactttttacaggttgccaatttttgcaatgatgaagatgatggaagtttctggagccgttggataaagcctgatgctgtattcgaagcagaggtttgatcctgttcttttatagatatattattaaaaaattctcaaatgttgttgtgtttctaataattttgtgtaatgtttgtttcagttaatgcttaaaatgattttcttttatgtgcctcatctttattggttcttgtaggaagctcttgttcctcgatctgctagaaatattaaaagttatgcagaggttgatccatctgaaagaagtaataaaagaaaaaagaaggaacctgaaccaactgaacgagtttcaaaacgccggaaagcagagtattccactcctgcagtaccaatgattgagggagcatctgtccaagtgagaaattggtcatatgggaatttatctaaaagagacgcacttcgtttttctcgttcagtaagattctattacttctcacaattttcagtgttgtctcactataaacaaaatctattgcttttgttacttcctatattggagacagaagcatttcctaaattaatatattgttgatgatcttcatcccactattctgatgctattttctctcttccattctgaaaaagttagctaactagatgctgtaggatctgcatttaaactttagaacgtagaagtttgtattgtaaagattataaatctgagataggaccataaaattgtagttgagcagcatagaactgaatagttatttcttcatattttacttagccggttggataggctaaatttttggcttatgcatggattaatggagctatgagcttgaggtggcactgaatttctaaccgatccgattctagagtttgtttctttactaatatatttaatataaaactataatttatgtttccatatacattacttggaagcaattaatatttggtattctatcattgggttcatctaccaccgaccccaattaacttgggttaaaggtgctgttgatgttgatgttgatgttgattcttttcttcaagaattgtattaactcatatggacttttgtgcatgcatgatagtcttaggctaagcttgactatgaattaaagccagctcaaaatggagttcatggtgactggaaagtgtttgctttcttgaattttgctgtttttgttacagaaatgacatgctttttatggtcacatgtacttgttctttaatttctgtttaagttgggagtgatctactccttgtcagcatctaagatttcttccttgctccttttttaggatagagttaattgtggtacttccctgtgggtcatagcaagtgggtgttgacgttgtacttgttctttaatttctgtttaagtagggagtgatctattccttgtcagcatctaagatctcttccttgctcctttttaggatagagttaattgtggtactgccctgcgggtcatagcaagtgggtgtgttgacgttgcatttacacctcccttgagttaatgaataaccttttctttttattgttctttgggcttttcttttattgtgcgttatcattttgtgtttgctgtttgtgcatgtatgtcttgtaaatgcttcattttgttattttctttagcagtaaataatttttcctgttttatgttcatccccaattaatttgccaggttatgaaatatggcaatgagagccaagttgacttaattgttgccgaggttggtggtgctgttggggcagctccacctggagcacagattgaacttttcaatgctcttattgatggctgtacagaagcagcagaacttggaaatctagatgcaaaggttggtataacgataagttccctataatagatagggtttgaaatggttatttgtattcttatttttttagaagcttataacatgtaataatattgcatccaggggcctttgctggatttttttggtgtaccagtgaaggcaaatgatctacttacccgtgtccaacaacttcaacttttggcaaagcgcattggtcgatatgaagatcctattgcacaatttcgtgttctgtcatatctcaaaccatcgaactggtccaaaggttgtggatggaatcaaagtaggtgtatcctcttatataatttgtgttattattctgttgactttattgctgctttgctaattgtattttgcctgttttcagttgatgatgctagattgcttcttggaatacattaccatgggtttggtaattgggaaaagattagattagatgaaagacttggccttacaaaaaaaattgcacctgtagaacttcaacaccatgaaactttcttgccacgagctccaaatttgaaagaccgtgctaatgcccttttggagcaagtatgcaattaactaaattcttatttcagcattatttttttttttctttttcttctgtatttacaatttatgaatctgccaaggggtctttaatttctttttttgcttgttctttgctctttctttgtttctaatgcttttacatgcttcctattcttcttttagattttgttaattacccttcatgtcattgtttggtatttaatgtttcacatgtattatatctcaatcactagggtatttactagaaagaagagaataagaggtggagaagctacacatgatagtacggtggtcataatgtgaattgagggtaatatgcatgctattagtcagaatagagttggcaaaaagttgtgggagaagggaattttgttgagtgaatgtatttgagtgtttaatctcagactgatatcagattcagaatcaagaatattataatacttacgtaaataggagatttctggctgtgtattctatcatcttggctatatgatttacatgcacgcttgtttgttttcgtttcaattttgtaaattagtggactttagtttccacgctaatgattgtcctgcatagccctgaattttgtttgacttgcattcatagtatccacttctgtgacatgttccaagacgtatgttttaccaatttgttgatattttagtgtaccaaagggatgtgaatgctggcattttttcatcactcgttttgtgtattccgttgattaaagatgatttgaagcaataccccaatcttttcatgtgcatgttaacatcccccacccaccaatttatgatctactttcctactaagcttttttaattcttcctgtgtacctttatttgttgatagatgctacgctctttgttgaatctatcttcattgtttgtcacttaccatgatgtcttgattttcttgttgtataggaacttgcagttcttggtgtgaaaaatgccaacagcagagttggacggaagccttccaagaaagagagagaaaatatgattaatatctcactgttacgtgggcaggagaaaaagaaaaaatcgagttctgttaatgtccaaatgagaaaggatagatttcagaaaccccagaaggttgaatctatagtaaaggaagagggtgaaatgtctgacaatgaggaagtatatgagcagtttaaggaggtaaaatggatggaatggtgtcaagatgtgatggttgaagaaatgaaaactttgaaacgtcttcacaggttgcagcaaactagtgccaatcttccaaaggaaaaggtatgtcttttggcttatttccttgtagtacgtcctttttttatttattgtctcactgtttactgcctccctactttaggtgctttcaaaaatacgcaactatttacaacttcttgggagaaggatagatcaaattgtgctagaacatgaacaggaaccctataagcaagatagtaagttttcattcctcttggaaaggtttctgtgttgtttttgtatgatatccttttgtttttgctgttggtctcctattgcctctcaagaggataggttaagatagttgttggttaaatgtttttaggattctctaccacgtgttgattttttttttttttttgcttatttacaggaatgactgtgcgactgtggaaatatgtgtccactttttcccatctttcaggggagaggcttcatcaaatatattccaaacttagacaggagcaagatgaggcaggggttggcccctctcacgccaatgggtcagtatctgtttcatttagcagaaatggaaatccattccatcgccatatggagaggcaaagaggattaaaaaatatggctacctatcaaatgccagaaccagttgataatactgggaaatccgaggcatggaaacgaagaagaagaactgaaagtgacaatcatttccagggtcagccaccacctcaaaggaccataagtaatggagtccggattactgatcctaactcactcgggatcctaggtgctgggccatcagacaaacgctttgctagtgagaaaccttataggacacaacccggtgggtttccttcaagacaaggcttctcttcaggtataaagtaaccagcttggtggggattagagtggctgattacaagagtgttggctgttggctttcactctgcatttatacagcttcagcaattgtacattctgtggaatttttttcttccacccatgcgaataagaccttgcggatccctttttggtgtgttttggcggatatgagaaatatcccaacactgggattcacatccttgaagatggctgaagccgaaaagatctaatgcaagatgaaaaattagtcttgccaattgtttctttttcctttttgatttctactccttcgaagatgaccaagcaaagtgacatggcgaaaatcttgaaaagcgaagagttttacccacttgctatagacatacttaggaaactgtacattgtcaactctgcaattttattggattttaatgctcaccccataaagtattatgttagctgatgtagacaaaaatgtattggatttttgtggtaattatagctttaatttccgagatcttgtagctccttcaagtgagtttcattagcgaatagtgaatgcaaagtttttttttatactcagcatagtgaatgaaaaatgatctctcggcttcttgcttaagtttccttcattcgattaaagtttgatgcgattccagtaagtcatagaatgcatgtacccagattgagacattgttccagcatcttttaagatttttgaattattcctttcctttaaatttaaatatcaatctttgtcaaatccaaaggatttgcacagtgatgaaaggtctcattgtgttcacatgagtgagaatgatctatttaatagaataatcgtgttttatttttatcatatgcaaaatttccttggaccagcaacagtcatgtactgcgaacgagattagtatctgatccagtgggttgagggatacatgtgatctctgatctaagactaaaaaaaatattttctttgacaatcataactggtaatttagtttattcttggatcttgttttattcttttgttatgaccaattctcaagaaattaagagaaggattccaatgcttcatgcatggcttttgttctaccattaatgcattgtttaacatctcaaacgaattatatcggaatgacagaggtatagaggttgtataagtttgagactgtacagttaatgatgacttaagagaattaattgttattatctacaccaataagatgcatttactttttggtgacctatcacttgagtgaagtgtcatcgtgtacgaattgtcgagaagtcgacaataaagggcgttacacattgattattgcatgcagtaattaatgggacgtagattttgttcttaagtttatttgtatatgtagattaaatatacttgaaaacacaaacatgaaatgtaaagcttccaccaggagcttcatttcattccagggcaaaacatcaacgatgagggacatagtggaatacggatatataaacacaagaattaattcctgcaaatcatcaaccaaggaaaacaattcattcaatgggtcctttagtttttctttcaatttcctgaataactagttttttttaacaatatttaataactattttatatgattttaatattttaaatacaaaaataaccaaccattgatattcattgaaatcaaggatataaatagacttttttaattatatatatttagcattaagttaagggaagaacctactaaaacaatgataaaagtttaagtattgattgagataaaatgagagtcaaaggtatctattaaacatgtaaagtacttatatattatttttcctttttaattgatcatctaaaaaatacaattgaaaatagaaaaagcaaaaataggaggataaaaatcaacaagaattaaaacaacacatccaccaatccatttagttaattagctttcctatatgaaatgaaaaaaacacgaagttacaataagcagagacaattgacgagatcagagcaattatgtttggtaatggtggcattaagaaataggaacacaaataaacaagatgaaaccaacattgtaaaatcacttgattagtgaaacaaacaaccaaagaacaagaacactattccagactggtacaaccacgaaaacgaacaaacaaaccttataaaatcaactaattcaaaacaaaatcacactgaatcggaaactaaatacaatcgaaaactagtactccatcaggaagtgcacgaacatgaacagacaaaccttataaaatcaactaaatcaaaatgaaattacatggaatcgaaaactaaacgccaggctccgacgcgtcgtcgttgtcaagcttcggtgatgacgcaaggacactagtgaaacagtggtccatctccaaataagaagataaaaagggactcctcctatgagagctcctagggaggtgaacattgatatgtgcttaatgatgaagagttacatcaagaagtgcaccaagttggcctcaaggccaaggtgtcgttgataagctaacattgtggtgacaaaaagcagcatgaaaccgacgacaaagaaggcattggaagccatgttgtgctcaatgaggtaagtaacagtaagtcagtcgagttttcatgttgtatccatgcattttgacatttttttttttttttttttggaaaaactcagtttagtattagtttgtgcaacacgtgtccaagagttttcatgtgaaaaagagctcgaaaacatacaattttgatgcaattagagcattgacatgtgaaccacgatcgtggtaaactaaagatgattgcgctatcaaccacgactaaggtgagctaatcatagatcacaaatcatggtccaatttcttattctaaccatgaccatagtggactttgtacgaccaaggatcagcttcaaggttttattatatatattctaatgacatgtacacactttaacacaaaatcttaatgttcatgttgtctttccttcacttatatgttattcaactttttgatttttaatcaatgagagacttcaccccatacttgtatttcaacaatagtccatctcaacgtaaacaatgactgctcctatgagagcccataagtaagtgtaagctgatacatgctgaaggatgaaggatgaaaaactccatgaagaagcgagctaatttagtctcaaggtcgaccctctgttgatgaggtaacactgcggtgacaaaaatctaacatgaaaccaaagacagagaagaagtcacgcgatgcaacaaggttggtaatgtaaagtttcgcatagagaaaagaagcactatgacgttcaacagggtaggtaacactgtcttcggcgactgaaacattacttcatggaacaatggcactgccgagagcatcacacctcctatgagatagagcatagtgacattcatcaggagcatgtagacaacgactcctcttatgagataacaacaaagtggcattcatcggtgaaacaactatgcatcttacctttttatttagtttaatcttttaattccatccaatccaatttaaagccatttgaattttcaattttaatcttacttataactcttttttttatatatagaaaatactaaataaaatgtaagatatataataaataataaaaataatttaaaatatcaaatattttatttataagtaattatgtaactaataatataatacttatgcatcttaactcaaataattagtaaaaatatctttaatgaaatatattttcataaatagatataagttatatgatattataaatatataagaaataaaaatagaaatgagtatacacatgtatgagttcactttgaattggtttgaaaaatcaaattcaatccaataaaaaaatttggttttccaatttttgatcccttcattttttttatttatttattcggttctcaattttttggattgaatcggtttatgaacacccttaatattcacaactctaattatattgttattttcaagttttggttaataatgatgtttcaaaataaaataaaagtttaatgtctatgcactgataatgaaacaattttacactattatccaatcgcaaatcatcgtttgaattattttaagataatgattttaaaattcaacaaacttaccatatatgataagttgtgattgtatgactgagtaaaactttttacatttttttacattgttagtatataatatttttcctcataaaataaaatattattttcccttcaaaataagcctcaattggaacaaggtttgattaagctaaaaaatatcaaaataaatttgtgctcacaatttaaagctttaatcctacattgagtaagtttaggttaggtcgatcatgattcttgaactcaatatgggtagtggtttatagcaagttgggttaaaaatgtcattaatttgaaattttaaaatgacggccaagctcattaaaaatttggtttgtacctttttttgtcaaaacaagtttcgattaagctaagaaagtattgtaggtttcttcagcgagatccatgtgagattagacacacaacttattttaccacctcatgcgaaagttgaaagaaaagagaagaaaactgaatgaaaagtgaagagtggcagaatgtattaaaaggggatgaaacaacttttaagaacataaaactagaaaatctattttcaaatgtgagttaaaatgattttgaaagtcatttaaaagccttttcaaccccattttatccaaacaaaaagcttggaaacaacaaactaaaaactcataatcactttaaatcgagtcttaatttttccttcctatattaatatttcttatctatcaagtatcaaatgttaatgatatatatatatatttaattttattaattcttaaaaattttcatttccccttaatttaaataatttatattttcatttatggagcatttggaaatattttcttaattggttgccgacattgggctgcgttgggccacgttagatgcccagatgtgagtaagaccaacatcaagaaatcctcagccaccacataatacgaaacacgtgtccgtaggatgtaaaatattaaccccacgttacatttggctaccatggaacgatatccccataagatgcttcttcaacattttctattggccagctcagtaatgcaacacgtgtaccctctcttcaatcccctgcacctctccacacgggagcttcatgtgcacatgcactgcacacccgttcaagtcaacacgcatatttacgttaatttttccgacaccatcacaaaaaaatgcaacaagcggtactatttgtattattttttaactttgttcttttatttgtttatttataaataaatgccacaacttgtaatttttataggataaaattagtggattattttaggcagttttattttgatgatgtgtgtacaaccgcaaccttgttatattagaccaagttgtaaggtccccacttgttattttaaaccaattttcaatagtattaattattgaagtgaaaatttatattttaattgaaaaatattatatctaaaatatacttagattttatccttttctctttcaaattagccacatcgaattttacttttaactaaaacaacttctattcttcataaaatgttatatatatatatatatatatatatatatataaatattattaagaatttttttattactttgagtttgagaagttgactaatttctaatgtaagtaatgaaaaatcatacgcaaaaccaaaaccaaaagataaatgttaattaatgtttaaagaaatgaagataaaaatattaaaaatatatttcaaattaaagatacaaaaattatttgaaaaattaatgtgttttttactacactaattaacttttttcgttaaataggaaagattataactattaaaaaatgacatatatgttatttcaaatcatggattctattattaataatatttatcattgaataattaaaaatattaaataaaatacttcctattccatcctattataattattgtcttaggttattttacacaaatagaaaaaatataataagtaaataaaagagattaataattttataaaattaatcttatatcatcattaatttgttgatagattttattgttcatcattagttttaacttaaaatatgtttttaatccttaataaatatataaattttgtgtttgttttctgataaaattttctgtatattgaatctctaatagaataataattttatttttggttattgacactttttgttagtatatgataaattatcaatttttttgttccatataaatttctttatttgttattagtccctttaaaaagactaataaaaaataaaaaaattatcaaaaaataaacactaaaatttaataatttattataaattaaaaaagtgttaaggattaaaaataaattttttgttttatcacgaaccaaaaatcgaagattctttttaataaagaataaatataaaaatcaaatatttattagggatcatatatatatatatatatattttaattttaatattataagggatggaaatgaaaaaatgtaattaatattacattaaaaaattaaaataataattattttaaaattatttttgttttacaacaattataataagataaacagaatatattcaatatcccaattaggtaacgttgttaaaagaatttaattgaacatgtgagggcaaagataaatcaattaaaggttgcattaaaaactttgaaacatgaatgttcccccaaagaaaaaaaacgattggattaagacttcatgtttgattcaaactcattgtattcattaatgtccgcaataaatgcataaattctgagcatactaatactactataaaaaatggttaaaaataacaagtggggccctcacaggtggtatagaataataaggttgtggtggtgcacactatatcttttcctgctttccatgccacaatcatgaaacaagcaatgataatgatctgaggaaccgtgtttgtctcgtgtctcatccatgaagagaaggagaagaagagatccaaaatcagaagaaagttacgatttttcgagatgggtctgtccaaggagaatctgaaaggtctcatactagctttggtgtcaagtgggttcatcggggcaagttttatcattaaaaagcaaggccttagaagagctgcagcagtttctggtgtcagggctggtgagggaatttgtcttttttctttttctattagaatttctatttggaagcttgttttatggtatgcatgtctttgtaatttttttgtcgtcttgtaggtgttggtggatattattatctcttggagccactatggtgggcgggaatgatcacaagtaagctttaagtgctgtttaattttgtttctatgcttttagtattgttattttttcgttttttggggtagaatctggattttcttgtaccttaatggttttattttgtcttcataattggttttgattttatccaatcttgtatggaattaattggattttatttttaatagagtttttgaatctcataagttaggatgaattaatttcgttttgcattgtatagtggaacctggatttgatgtttcagatgctttattatttgctagatttctttattatacactcacatatggtagatcagttgtagtgaagttgaaggttgattaaaatatgcaaattttagtttatcggtcattttttatttatctgatttcttgcagaatctgtttctgtatggtttattgtacagtgattgtaggagaggttgcaaactttgttgcttatgcgtttgctccagcagtcctagttacccctcttggtgcattaagtattattgtgaggtattcccttaattttcattgttgattgagaattaaggtggtgctagcttctaacattggcgacataacatggttgcttcttcaatgatgtttgcatggtatcctctagtgctgttttggctgacattattctgaaagagaagctacacaatcttgggattttgggctgtataatgtgcattgctggtagtatcattattgttattcatgctcctaaggaacaacctattacatctgttctggaaatatggaatatggctactcaaccaggttagaatacactgtcttgttttttttttttttttgaatgcaattcattgtagttccttgattacaaatatatcctccctgcttgcagcttttctggcatatgtgggctcagtaatagtattggttttcattctggtcttccattttgcaccaagatgcgggcatacgaatgtgctagtttttactggcatttgttcattgatgggttccctctctgtaagtaaattaattaactgttatctctcctactaagtcttctgtttgataattgatttaaacttcaaagttttgtttactcaaagttattaagtttaaaacatatacaatctaagggacatgatttcatgtcgaatcctattttctaataatgaatttcatttcataaataaagtttcagcttccatataattttttatatatattttagttgtatggttatatgagactgctatggtctataaagttttctccctttcccaaattacatggataattatttatgtcataataaccaatgatatttactgaaaaatgtttgctttgtagtaacactgcaataatatggtggctgatctaaactgaattgctataattttgcaggtgatgagtgttaaagcccttggaacttctttgaaattaacttttgaagggaaaaatcagttaatctacccagagacatggttttttatgttagttgtggctatatgtgtcatcatgcaaatgaattatcttaataaggtttgttacatgatcttaaaattagcacactgggcttgtcgtacatatattcttatcaatgacctactagtggtaggtagttcaaacatttgaaaaattcttaagttgttttgttagtatataggatgcaaaatttctcttttatattttatgtgtttcatctattctatcttgatcatatattccataggaactttttttttttttttttttttgtgcgtggggggtgataaaagaaagatttattgtaaagaggaggaagaaatactagcgaggaggatatcattgggcctaagaggctcaaaaatgaaaaatgcaacaaaactgctaatgtctctatatatgaaggagactcccttacaaactatatgggtatggtagtggcaaggaagtgaaattacgcccatgaataaggatctgagtgattatggcgaaacaataaacaagcttcacaggaggcagtagtggggaagagtggaacatgtggatcagtgaatgtggttgaaggagagagagaaaataacagaaaattactggtggcaaggggatagagggaggagagtgagaaggattatatgatgggtgtgataaccgaatagggacaatgataaaattggtatcaatattggctaccctgagtgcagaagctagttcttcctcaggaaaggggttctctaatttctgctatttgtttattttatattgttcatcttgtaaggagctagtctccagctattaccctagctttctttttcattttcttggattgcagcactgtaacagaggtttatacctctgatatagttctaattgagtatcaacattagttttaccatccctattctggttcctaacaacattagtttattcttctaaaaaattgtacagtaaaattagttttgaatagagcttaatggcgttgattgattaattatcccaatacctaatgggataaggcttggctgctgttgtaggcatcaattccataggagtatttttgggcttagactcaagttttgagattttggaaaagtcaggaaaataagtttatttactttgacttttggcatatattataatattgctaaattaggaatcaagcaaagcaaagaagctcagatttgaggcttctgtttggttgtgacttatatatgagtttttttgtttatcattttgtagtgtttggtgttttgaggaaatagaggcggtcttgttgccagactattcctttgaattggaatgcagggaagtttagctacaacttcatatacaattaaggaagatgacaacttaatataaaacagaatgaaaaatcttacgaaatgaaattctgctaagctttttaaatgatctagaattcttttcatacctctttttaatatttcttttgtttaagttaatcttatcagacagtaagaggggaattacattccatgggaggactgttctgataagattatcagtaatggctccgatgattttactagttgcatattaaatcctccatacaacatacagtattacaacatgcgaattcctatggaatgtaaattcaagatagaacaaacctcagaactcagaacccagaactcaagatagagtacccgacactaaacctcagaactaagagattacataatacaacaaaagtcaaatcaagatgcaacaaaagtaaattgttttagatcatgcaactagtaaaggtttggtgtttggtactatatcattgcttactgataatctttaatcttatcagaaattgtcttccgatatcaattgattgtaagttctctatacaacatgattttacttttgtagtattatgtaatctcttctgagttctgaggtttagtgttgggtactctatcattcttatacaaaagagatctgcatattagtaagcatgtgcacgtgaacattagcctggctaggtggttacttttctgtttctttacttttgttggtttcttaatctgtttgaatgtgctatcccttgatgtaatgacttgatcttttagatgtttaaaatgaaagaattgtttaattgttgaaaatactggcattcatattgccaaactagtggtattgagaactcctcaaaatgacatagtgatccattatattttgtgaattttattattctttatcaagtcttgttcaaaatgatgtctgagttatattcaatggaaaaagaaatcaattctagagaattgagattttctctgtgcattgtatacaaagttcttatatatgaaattttggatcacttattcttcactgacatgattgtaatatttcaggctcttgacaccttcaacacagcaattgtatctcctatatactatgtcatgttcacaacacttacaatactagccagtgtaataatgtttaaggtatgatcaactagttttggcatttaatgctaaatgcataagatgtttctgttgtctacgaatggtacaagaacctatttacatttaaaaataatgcttgcaggattgggatggccaaagtggtggaactattgtgtcagaaatatgtggcttcattgttgtactctctggaacaataatgttgcatgcaactaaggactttgagagaagctcttcttttagaggtgtgataaatttgatcatagcacttaattctgccgccactgactatcccgatgaatgtatggaaccataattgatattctttcatatttgcatgtgttgaaacaattgcaggcagtgcttcttcatcggctatgctatctgcccgactttttaccggaaatggggactcattacttaagcaagatgatgaaaatggttctcccgagagtaatatgtgctcaagaaggcaagagttgtattagatggttaaagatcttaattcatttaattgtagtgggaaggagaacccttccctggagaatctgaatgagatgcccttcagattatactacatcatgcagctgtaggtaccaatgaaaccatagaatgatgggagatttgtgaagccattcttttatcttgagcatcttaggaatttgtcctcatagattttagttttgacattgcaagacggttctggaaccaatgctttgcagggtacataatgtacagcgtgttcacttgtcaaaagtagctaatatgctccaaatagttatgagattgagattagttgtatttctgaggctctctttacatgaaccagaaaagaagtgagtgggggatagagattaatagtttgtgaaaatcatatgcatggtgattttgctttgttttttcaattttatttatttgttttctttgtcaatttggcttggcatagaggattcatttgtagtttgtaagtaattagatatgtacaggaagctaagagacttctctcaaaattgctagtttgctatgaataagaaatatgttctcattcttacattaatacactctgtttgtgaagctctcaacattatttgtatgattatgcgttatgctcaagtaaacatatattatgaactaaccattgtgggggtggggccttgcaagtatcattgtatcaactactttgatgaagccaagaagtgaacctcacctcagaagtgtactcttaatgttagcaaggcaactcgcaatttccctagctgtctctttcgtccttgtctcaatttgtgttaataataatgttttgagaaaacacaaatataaagggaagaaatgcatgtaaaaaactgggatgggatcctaaattctagtgctcttatttttatgcaattttaattcccatacactgaattttgaaattgggtctctttgttggtttgacattcaaaatttaacatttgttgacattagtcataataagtaagctaagggataactggtaacaatgaaaaaacctaatttttacatctaataaaaaaaataacttgaaaataacaaataataaaaattactaaattataagaactaaaaaatgtatttaagttttatatcggttgcaaatatcatagaaacaattaaaatataaaatgcaacgaactacgaagaagtgtcaatttttagcaagaggattgctttctgcccccaccagacctatcttcgtttgcctgtcacaagatattacgaaatgacttaattcttaagttttcaaaacgcgacataattttgcattacacaagtttatgaccagatcacaagaaatacagtaagaaaaaaaaaagtatttattacaccatcagcgactaataaataataattgcagaaaagaaaatgtattgtatttatgggggtttagtacttaggaggcggtgtccgcggcaattaatctgaagagagggagcgagttggtgaagcaaattcaactcactggaaactcggttgaactcggtgtgtgtagaaatggcgaaacttgaagcgaagctagggatgattgtggactcggtgggccagttcttctccggcaaagaccaccttccttattgtgactcggacgtcgtcgctgtatgtttcatattcataagctctttctctgttagggttttcaatctcaaaatctctctattcaatctatttcttatcaattatgtatgtttttaagtgtttgagattgcaattgattaattaattgttcttgtgtgtggcactgcactggcagggatgtgaaagagaggtgttggaggcagaaaaacaatcatctgaagagtatatgcaagactgtctcctgcgtttatcatgggctcttgttcactccaaacacccacaagatgtgcaccgtgggatagccatgcttgaaggtctctctctctctctctctctctctctctcttttgctctttcatcatgcaattcaattatgtatgtatgtatgtatgtatgttaattgatagttaaatgacatgcaattacatggaaatggcagcatctttgcctgccacaaaggacccattgcagcaaagggagaagctttatcttctggctgttggatactatagaaattctgattattcaaggagtagggatctcgtcgacaggtgcctcgcggtatgtatccatctctctaaggaatctcaatcgtgatatttagtcacatttataatttcttatacatgtaacatgtccatgaagtatcaaccaatgagtttctcatcgatgactaagattgcttactttatcctttactcgggacttacttactttagaggagacaaatcctaattatacagcataatgattttgccttttctttttgtggaaaaaaagtatcgcaaccttgtgttttctgctattgatttcccctaatcagtgtggcagaggtgtatgttttggacctgaaggagaaggaggttgtgtttgtgttgtgtctctactctctagcataatgcccgaactatatttgctaataatctaatatactgtgagtatcaatgtgtagctagttgtcatctgtatcttgcattcaaaaacatgttttggaatagaatctgacttctgtatgcattctctgaagcctgtacttattttactgtaacaatgcgctgacagaaaggaatacaatacatcgtctgttgggacgtctcttaactgatgtctccacacgatttgaaattgagttaaccatcttgaacacttagacactggttgttgaatgtagacattggttcactagaatcatatactcacgtcttttttactcctcttttccttttcatatactcaagtctttgatgcgttgtttctttgttatagaggaaaaagttatagattcagtatctataaagttttgggtttttttttgtgatatccctctccaaacccaacaacaaattccaagcaagggcaaagcactgcattttttttatttttttatttttttttaaattttgatctattgcatatgcaccaatgcagcatctatgtactttaatgtgatatcatgtcaatgttttcttccttagattgcacccgactggaggcaggcagtgacactcaagacgacaatcgaggataagatcaccaaaggttcccatcaattcttgattttccactaacatttttctctgctccttttttttcttgccaagagcaagaggataagcactgactgcttcttttctttcattgtagatggtgtcattggcctaggcattgctgcaactgctgtaggacttatagcaggtgggattgcagcagctgtgtctagaaaaaagtaacagaatcctttctatcaaactcacatgatctggtatggaagaggcaaacatctataatactgtgattttgctgcatcttactgcttttatgaaaaggagggcgtgaacaataatgtgtacaaagcggtggagatgatgtctagatgagagatgatgtattgtgtgtcttcatgtttaaaaaaaaaaatacccctgtatttttgtcatttctgtaatttacttcctttaatgtttttatctctatcaataagcctcccccctcccccacatttcttataaagcaatccaattacgctactctctttgagatatgttatttaagccgtgctgcactgcgtctaaccttgaataaaaatgtatcaataatttcaagttcgatgcaatcattgttgaagattttacgcattcaacaagaaagactacgaacgaaattaaaacatatatgtgaggattgaaatatttatatagattagaacgaaatctttataccaactggattgaatcaaatttgggaggcatgtacaacaatttggcatctcgtactatgtgtgctttcacctggaaatctcctatggcaacattgacaacgaaaatgagagcagtgcaaaaacgactaatgttcattttttagttaagctaagctaatcaggacactcgtcttagaggtggagttaggaaagtcaacatttgtgactgcgcgtgcgctggtaaaattgaccataaattgttgcattggcagaattcgaattgggaagtgaagggtaatttatctttcactgctgatctccgtgagacttttctaattgttagggtatcatatccaatatttgtgttagatttacgtacgtcaattcaagattaacaagagtgtaaaacttatacaattcacgccaatttttaccacttgttgattgttatcatttgacatgatggcttgaaattgctcaaaccatagtcatccaagaaagaactaattcacggttgtttcaaggcacaatcaagaaaataatgcaattctgtttgaggcgaaatacccccctaggaccaaggtaggccatcacaaagaaggcacttttaggaaatcccttgaagcttcctaatcctatcccacaagaatcacttaatcaacaagagtagttaaatgaaggaaaattccgtgtaattccctctaagtacacggtcaagacaaaccacagaaaacaaattttgaggagttgcaattgcttgaggatttgaagagtgaggcttcagtagagagaccttccatcaaaggtgaagaacctgaagataatgcattactcaagtttatgctaattccactcttaatccgcagcattcttttttactcgaattaaaaatcatgtaacaatatttgaaccattagcatgtgaaaacaagatcacgtacatttttcctttcaaaacctcagtacaactgtacaagagtctcctgcagtgagtttccctatcataaatactaattatttgattctgaagtaataattttttaagtattaattgttgaattttcaaccggctagtttgaaagctatcttgcatacatcatctgacattgatgtttcctatgtaattttgtttggccatagcattcttggttttcaattcagcacttaatgacaaggtaattacttaacaagaactagtatcgacattagaccattaaaccacatgtcaaatttatataattggagattgacagattctattactaaggaatccaatagacacttgcttgtttttctcatttcttgaacaatttcttttaacttccttttcttccttgatagtgttctactctcagaaatcctcccaaataatatattttgcagcattctaatttactgatttatttttttggtgaattatgaaataatcagcatatatcatgatatactgattatttgatatgcagttaccaggcttcagaaaatgtcttattagacagaatacaattggaattgctaccattttttttggtcttttctttagtgctggaagtttaatgcataagatgcactaactcatcactacatcacctgttccacattcctcgtgcactagatctgatgtttaattttgacaaaaactagaaattcattcaactgaagggactaggattatgcagcgatacagagaaagaaaccaaaaaacgaggctcaatcaacggtgggattcacttgttctgttacacgacaaaagaaatagtaggttacacttggacagcaatttcttccttcaaaacaaattcaactgcgtcattttgccatgcaaggggagatggtggacagtcccatgacaatggagaagaaggaggggagctccactgcattgaatggtcaaaccaatctgaaaatttggacattggcaattcaactggttctgggtagcattgaggggaatcaggaacctaacgccacaagaaaaaggaaaacagaagatagagcaaatgttagacaaaggggaagcaacagtaaaaagtttctaatcaacaaaatgcttaaaaattgatatcagcttgtagtggattgattattaaatgcttcaatcaagattgaaatcatcttaaagcatgttattttcattgtatatgacaaaatgaaatagtacatattcagtggttgttctcaaagcacccctcagcttcaaatacatgtaaccaaaacaaactaaaaaaggggtcagaaaggtacatcattacctttatcagctctaggatagatatggaatctgcagagataaaatgttgttaggaattttatcaacattatctaataataataaccatcaacatgatagtcagggacatccaaatttaattccccgaaagattgaataggaatatgttcagatatattttaaatcaaatcatctcacaagaaatcctttttgtcaaaagttactaatgccaacttcaatgccaaatgtcaattctctcttcattgtattctaataaagattgctagaaataagttactcaagaactcactcacatgcacaatctcatcataatattcaataccacattttacttgtaagtcgtaactgtaaagttaaaaactacgacattgatttaattgatgtcaaaattataaggtaaccatcttgtggtaaactaagaaactgatttaattgcaccataaagattttcacaactcatgccatacatcgaatactgaagtaaaagccataccatcttgtggaagaactttctcaagattgaaatttctcacagtagcattttgagcctcaatgcacttcttgtgatcatgcaagaacatttcctcctttacattaatatcttccttgggtaaatttcttttcttaaccgaggcttcagggtggtgaagtgaacttttgtttgttatatcatttagagcttttcgacctgcaatccctgaactatctttctttccatttgtcttcgaattcttcgacttagtagtctctgtcccgagcaaacacaaagggcaaacaaaactaacacagtaagagaagagtgcagtaaccaccaatactgttacagaatgcaaagtcaatttctaaactttgaaaactttttcattgctaattcataatgaatcaactatagtagttggaaattggtgttataagcaacataacataaaaattaaaaatacttacttttagaatgaagattcaagttttcatctttgataatcaggtggccaggagcaacaaacttagccattatcctatttcacttttttcagagagcaaagactttgatactggactctgcaaaacaaattaaaaaattagtgtgaataaaaaaaaaaaaaaaaaaaaaggttatgaacatcacgaggaagaaaaacctttgctagtgctaatattttcttttccatagcaaaatcccataaggtttctaggaaagtgccgtttactcatatgtttcccaattccaagtatcaatcaatcaagtacactaactttaatgaacataaatcctaattcaaaaacattaaagaaatagaattcagaaatataacaaaaagcaaacagaagcaattgaacaaacccgaaatcgcagaaaggttaaaagtaaagaccgcgagtagagagcaccgaagatgaatgataacgagatgcagaaggaaaagaagaagaagaccgaaaacgttaccgttcgttggattttgaatttttcgtggaagcccgctacggtcatatcgtttatatatatttgaggaattttagacaacacagcccttcacgcaatttcaaaattaccaacttgccttcttcccatttaattcctaataaacattttaccccttcatatatatatatatatatatatatatatatatatattattgctaatattggctaggattttttcagccaacgtcaactaaacttatttttgggtcagagctatcttgtaaagtgatgaacctaatttaatttattaaaagaagaaaataaagtaatttaatttatataattaaataagtatatatatatataaaattaattaattttacattatttaatgttaatatctctaaaatatcctttatttaattgaggtattagttttagtgatttttctttattcttcatatcaagttccaataaaaattataaaaaaaatatttttattaaaattagtataattaaatataattaactaattttattcattcttacctcctctctatacttcaaatcatttgatcccttgaattaacagtttgatgataaataaaatgagttaaatgtgttttagtaaaagaaaaaaattaatgaatttgagtaagttttttcttctttttgccaacgtcgactaaagaataactctgatgagatgagaaaaagatatatttattccaactttaatgaaaaagtagtaatactccatattgtttttacattacaaagtgactgtgaattaaagagagcagaaaaggaaacaaggaccacatgcaatgatgcaatcatttagtattttaatgttacaagtccttgctcaatgacggaactaaaatactcaaattccccactacttgtaaattccaagccaaactctatccctccttctccgtctccactttcggcaagagacacacaaaatatttggggatgtaccatcatctccactttggtaggttttccaaatccaaagtcagtctcataaacatcaaatttaggtgaccctccaactagcattgtacttcccaatacaaacatcttcctacttaattccttccagttttctgcatctttaagaggttcagctttcatatcaattattgcccttgcaatgcccttcactgccttcacaaaaccagcttctccctttagctcctttctcttgagcaatgcatgacatcttgttaagcaatttccaacgtatgttgctggtataggatactcaaagcgatctctacaatctgctgcaaaacgaaagtactcctctttcatgatctcttgttcatcttcatcattattatcatcatgtctacattttgctttaacccagctagcccacatgaaaccacatgtaaccacgaactttgatagatattcgggtgctttcatcaattcatcatttttttccaactgattcagcacccatcttttcattccctcaatatcatctcttccaaaggaaactgttgccttaacatagtcctcatcatgattaggagtttgaccaatgagtttgagtttgtccttccaagttgacctctcttcaaagtagtctcttaagaagatggcctcaagtcccttggtgtccttcaacacttccctatcaaagcaagggggtgtcaagtcaactccaccacttctacaaatgcttgaccaatacttgatgaaataacagctactccttccatccaggatcacgtgagaatttgttatggcgatgcaaaggccatggttggggaaaaccgtgatttgcaaggccaccaatggggaaacatatgtgtcctcatcatcatcatcaccatgcacggttgtgaatgtcaacatgggaactaagtgatccaaatctttgagatttttggggtggttggatgagagatggttgaaatatgctttggactcgacgatggttaaggtgacagagtcatcatcggtgcagcgaatgaagggtttgtgaggttgtggtggacaccggagattcccagcgagagggaagaaatgttgaagggtaagagagaggttgtgtttgagagaagggaatagaaaatgtgtgggggatggggaaagtgatagaagaataggcgtttcacataaataggacgtgcataaggcaagtcaaggaatgatagaggaaatgacatggttctacctgtagctggagctacctgagatttatcaacaaccttatgttctctatgctctgccatttgttcacctgctccagacaatcttgatcaaatcggataaatttctctctcaatagattatctattgcaattgcatatatcaggatttcaaactccaaacctctaattaggctgaaaaaatctgcatttaaaaaagtttactttagagcatatataagggcgcatacaaattgttcattatacgatttccttccgaaacagtgatgaaacatgcatcgttgaccacagcccacagaacaaacaagagcagaaaatttaatccaatagcaatgccaaagcaagatgacggaacaaccatcaaacaaaacattaatcagaatagttcattccccaataatcccaaatttcaaacaacatataaatggatgcacaatataatgaggcctaacttccaacaaacataccttggattttcgagggaaaggaagaaggaatagaattttgagcaaggctgataaaagagacaaaaatcgtttgttttattcattcagaagataaaaaacgtttggtgaagaagcatattaaattgaagctccccactcagcttaatctaacgattaagaatgctcaaacgctgtcaaccgtcggataccatctaaacctaattaaatacagcttttagcaacatgcgctcacctagttatttaatttaagagaattgttagttattagttaagaaatttaaaaaagaaaatagaaatatttattataaaatttatagtacagcacaagaaaaaaattatgaataataacacaaatttatgtattttaattaaaaattatttttagttccttcaccaatatttgtcttaatttaatcatctaactaattgttttcacacacattaaaatattttctaaattttcataaaataaatttttaaatatttaatatttcccaaaaatgtaatttatcttagttatcttagcttagttaaaatataattgcatcaccattattaaagttattaatcaaaatatagtaaacaagaacaaaatatactaattccccccttcaaagtagtctttttattattaatattttcactataattttaattggtacactataataattttatctaaatttgtgaaatttttcactaaatctaaaataaataagagctcttacaaaaatttattttattaaaaatataatttcaaaacaaatgaaaatatatacatgcatgttcagttatggaaatgaacgtgttcagtacagtattccacaccatgaatcttccaaaagacaagtcgatcaaagacctaattaaactagcttaattggcgaatgtgttactgtctttaattttcaactcggccacttgtataaagttgcttttaagttttaacacattcatacccctaataagttatcaacttacattatttgtgtaactgatatttactttgtactactatttacataaaattgagatagctagatttatattgagtaaaaaaggctgaaaaaacctgttgaatgtgatgatgaataaaaataagtgctgatgaggattttttatttatttatcaaaatgagttattttacaaaattaatttttaaagtgagtgttttacaaaattatagacctgtcatgggttattttactatgaagactgaccattgatccatcactctctgcattttctttgtccaatttgtattcctgaagtgtgcttaaagataagaaattcaccaaagctcctacttcctcatgtctcaaatacaagaagaagaaaaatatgttttacttgatttcagatataattttttttaactttacttccttccatgttactgtttttataatacctttcatttcatcaagattttaatttcaatgactcatttttattttttatactaagttccaatcaagaataaaaaagtaaggtgaaaaaaaattaatttttaattgagattaatataattaaattaataaaatactttttttttcttatacacgagagcaaagaaatatttacatttttgtgtgttgaagcaaaagccattcggacaccaactgaacagcagcacacagcttttaggttgtcaggtattgctatagaccccaaaaatccaatcactgcaccctcccagttttaattaaattcattaaagacatatttttatctaaacgttcattgaattaacatcaatatatctttattcaccgttcattaaattatgctattttgttctttattttaatacattgaattatattctaaagatataaaaattatttgatataattacgtttttacacttttattcaaccacataaatagaaaaaatgttgtgatgaataaaaaaaaatgcgatttttctattttatgtactcctttgttgattcaaaattaaagaaatgtacgaagatacaagatcaatggacacttattaaaaaagacttaaatataattttagttaacgtaaaatcatagttttaaaaattgattcagtgattgactcggtcatggtactaggtcattggatcagttatcgaaccgatgaatcactaattgatccgcatgatctaacttataataaaaaaatataaaaattttatatctatcttaaatctttcttctggtacattcaaattcaaaagtcttaaaaacacaaatgaaatataaagaacacaagttaaaaaatgactattatctctgacatttaacatcaaagacatcaatgaaagtatatatcaatattcaactaaaatgaaacataaccataccacatcaatatagattataaaatataaagtaccaatccaaagttccaaactacatttttaaaaattaatttgggatcacaatttcacttgcaactcaaccacaattccagctacttctaaatcaatttaactcaacaaaaatgcaattgcaaccataaaaatattcaacaatgaatgaaaaatatcaatttaactcaaaatcacaaaaaaaactaaaataaaacaaaatgaaaaaaaataaaataagtaacctgatccgagccaacgggtcactggttcgaccacaaactcggtcgggttaatccgggttattccgggtcaaaagtgtaaccgatcgaacttatgactcgatccggtccaatcatcgagtcgcggttcaatcgattggagcgacctgatcggtctggattttaaaattatacttaaaatacatcagcataagtaacctaaatagaatagttaagtaacttattgttttatagattaattatcgatttttgttggtgaccaatctttgttgaaaaatttggttgatcatctttaatgaatttttctctttaaatcatattttttttcatccacaaaactcgaaactgaaattttacttaaaaaaattaagtctaatagcactcataccaacaatttattgatatttaaagaacttaaaatttaaaagtcaaaaaatatttttattgggagagaataaattttactatccatgatttttttttttcacttttttataattttcacattaaatatatttttttggttccaagtccttagcggttacaactttcaggtttaatttgtctttgtctatgcatctttccatatatatcgaagcacgacactgcctatatgcgaattcaggtaaccactaatagcatcgcatgctctcttctctacacaacccaactcgtcttctctcatgctcagctttttcttttcaaaaaacactatctgcacgcctatgtactctagtatcatcacactaacctctcactcaacaaattaaagtctaacccttgatttggagtcaaatagttaattccaattttcaactagataaaacatgtagccatgattattcatccaactccaattacaactagataaaacatctactctatcttcaacaatcctatctttagcactgctttaccatttaaaattgttcaaattttccaattactatacatttggtatcagtccatacgtatcacttactgagtgctataaagtgtttaaaattctagtgaaagtaaagtaataattagcttctgttggcatgatgtcatgttttttttttataacaaatattaatctattaattttgttaaaagtgtcaatttatgtgatatcatgttaccaaaccaataaaagaatttggtctaagccatgacagacattgataataattagtcattggtatcatcgaaaaagataaaatcaatgacacgtcattaataattaatcttccacatccttttttatcataatgatcaatcatattatatcagggaaagttataagggtagtgtgctcacttaagctgaaaagatagattacatcactcaaatccagtagttatatacaagagtttataaaatgagttatatatctattctagctgttgaagctagatacatgtagcagctagttatatatcctaagtccatgttcttaaagattagtaaaattatgtaataggaagaattaaaattatgtaagaagtcaagtgcaaggaccgtattcattggaaggataaaagtaaacgagaaaatcataggcatgagacaattttaagaaaacagaaaagcatatacaattctgtggtgaagataaataagttttttcttaaccctcacagaaaacatctgttgaatgattaaattggtatcctgaattgaaatagcaattaagtactggacaagttattcattatatgaataagcatcataaatatatcatgaaattaatcctacaacacttgttccagaaaaccctttattttatttttttcatttccacttaaaatcttcaacaaatagagtagtgcctaaagtatattctcctccttacagcacaccacaatgatccaaaaacccttgtggctgcttgttacaatatcaggcacccccatcacaaataaattcatatttttttaacatctcgttgcaaacatgaattttggacatgcatctattactttcacatctcgtcgcaaacttgaattttggacatgcatctaaaatttcaactgcaacattttatgtagatggctaagaaaagaaaatgttggatgtatatgtattgggatcaatatcaatgaccattaaagggtaacaaaggcagaaccaatttttggtatgttctgtcagcattccaaaactttatgaaacaacatgaattttcatattcatggtgccaacccttttgtggaggcttaatactacaacaattgtacctgtagggccaccaactaagaaccattcttacacacaacaccacttgcattcagaaaaaacatagacgaatccattcaaacatagaaatctcaactatttaattcaaaatcaccaagaaacatcgtttagtccataaacataaaaccaataggtatcgatatcgaacaagggcgtaacatgaggcattatatcctactatacaacataaagagccttgcgatgagagcatgcgtccaacgtgagagaagcaaagcataccgagaacgagtctgcataaagaatttcaatttctttaatttttgaaggaatttgaaatccgaagattttagtttattaaaatactaaaatcgcaaattcttcttaaaatctttatccaaacaccttattttacaaagaaacaatctttaaaaaattgaattaccctatcaaatccccccccatccaaacacacgaagtatttaaaaattaactaatgtttcatagcacttttttactttaacatatagtatgaaatttaaaatataaataactcctatatcaattaaaatgcaacggtgttaagattaattaataaagtggcgcaggccgcaagggtctctgctcgttagtcgttagatatgtctccaactcggtatgactaccaagtacaagtgcaagagcaggaaataaaaagaatacaaatatgcaattggcagggccatgtatatttaactacttagagccgtttttcccatggcggaaggaatttatatcccgtgtagaagaaaaatttgcaaatgcattcgcttatgaaatttacactgcagctcctttcaagcagagcttgcaacctactaagaatttacatttctcaccctcaacccccacacaaggtacatcatatagggaaaaaaatggaaagtgaaatcaaagtggaaaattaaagaagaaaacgaagaggaattacaaaatcacaatcaatccctattctctctcctactatgccaatccacctaagcttccctcgtcgtttttatattagatggaagccaaatgtaattgatcagttcgatcttgccctaatcccagccaaaatgtcgaaaaacatctcatttacaggttgtcatgtcaatgagccaggtcttcactcccaacaccaacagaagacttgtcaatcatgcgcacattgtactgttcgtagactcttccgcgattctcggcccaccattgctctgcttgcttctcactgaaccgcttccgactgcaatcaccaacattaaggttataaaattgttaatcgtgaaatagtgtgtagttatctgaattgtcccaccagatacaaaacattacggtgggaaattgctttctactttcaaaattcaaatagagaaaatatgcaactgtcttagacatgaaacataagaacatgcaaccaaattgccattagaatcaaaatgtgtcattgacgtaggaatatttttgtcaaggcattaacaccatgttatattctactttttcttctatggaagtatatcatattctacattaacaaatatcacagatgaagttctgacagagaaacaaagtctacagagcattgcatacctgaagcgaactctcttaagatctattatacctcccggaagggaggtgagtgtgatatatacaccaggttcatcttgttcaacccattcagtttcattacgggattcactgtccttagttctgctcccatttctatttgttgaatctgactggctctgtttagtgtgtcctgtgctacggctactgacagtgcttgatccatttgaatgtaactggtagtttgatccagttaaatcagcctctgggcttgaagcttgaatatttaaccgatcaatggaagcatagataacgtcattggaacaaggattggaaccaaaagaagaagcaagagtcggtgatttcacagttctagcagctcctacaggtaacctctcagccatgtccttcaactactcagcacaagtaacaaataaacgttggatcagttagcctagttaagatacatcgagtacaaatcaagaacataccttatataagcttaaaagatttaaaaaaaaaaaatccactatgttagcataaaattgatatcgggcttgactttaagtgtaacatttcatggctttactatttattttcagggtcaaatagtaattaagacaaccttgactatattgctatagctaagaaaaatttcttggacataacagttgatttgtttcaaaaagaaaaagaaaaggatccacccattacatgtaaagttttttgctcttttttgctttcttaatgattaagagttttggctataatagtctaatttgttaaagtagtttaagggattaaagtttctacctgggcagtaagtgactttattacttcctttgctgctttacatttggcagtttcttccccggcaattgctattgcatcttttagctgtttagcagttctttccaactcaacttcttgaagttgggccttccgagtcaggttttccacctacaaggggaaaaaactacttaggaaagaaacgaattgttaacaggataagctctttaaaattgattcattgaaccctccaaaacacaatggtaaagaaaaaagtgcagtgtcaaaataaaaatctactcactgttagtgttaatattttattatgagatagaattataaatcacaaaccctgactaccttcaacagtgacttgccacatgttctgcattgcaacaatatattaaaatttacatggaaatacctcatctctagcacacatatggtaactttatgatgacctggattttaaattgcaattcatctctagattattatcatacaatacagcaaataattgagcaactcactgacttgcaatgaatatgcatcttgctatctacatccaagcataatagtataaactagcataataagcatatgactcccttcttgccttcatttccacagtgtctatagctcatttcatcagacataattcacataaattaacgtcataaaaaatgaccagttgtaataaaaaatatggtaccatacgagtccattttgttaaatttctattcaaaccatttagggcaagaaagtgaatactgttgacgaatgcataaagtaagatacctgtgatcttaatttaataacctcctgactgaggctatcgttagtcctcttagcatcatccacaactatctttggggatgcaagacctccaagtgttggggttggtgtagttgaacgaggtggactaggccgtctagatattggggatgttgctcgggaaacaattctagatccaggaacagaagcagagaaaaatttcttcgatgatccaaaaacaggattaaaagatttagaaatattcaatgctccccattgtgaacccccatttggaacgggcgagacacggctgctgttgaattccaatttcttgtttttcttcgaagatctgctttccacttgtttgaaggattccattgaagaaaacctggcaagttgattacgagatctgaaatccaatttatcatccttatcaattaactccagaggcccctgattgacacttcctcttctgctcacagaatgagatgaagcatcagtttctacagttttcctaagtttattaagacaattatcacagacacgataaggtttgttggggtttggtgccattgaagccttgagagacttcttactgctacatgaatgacaaaaaacaagtccacaattataacaattgtggcgttttcttttgaaattaaatggcatacgacagcctgaacacatagactggtcaacaccagatacccacttatgcaaacaaatagctgcagtgaaagtagttccacaagcaatacttttgacatctttgtctctcagagcttctactaatgttggggtatttctatcgtctgtatcgccatgacctaaacggccatttgcacccttgccccaagtgtaaacttcagtccttgaagttaaaacagcaacatgatatgcaccacaagctatctcctccacaaaactctttgacaatttcccttcaacacggattggtagcttcccatcagcttgaggatttcctatctggccatagacaggactacccattgtatagacatggccagaggtagtaagtgcaacagtgagactatgtccacaagcaacttgacaaaaattgggttcaacaagggcaacacaggttggaacaagttttgcttccttatcaccatgcccaagtcgacctttgtctccatcaccccaagtaaacagcttccccgaagagcagttgctggaacttgaatttccaaccatgacttccacgactgcagcagtatgccaaacaccacatgcagcccgcacagtacgaagacccttgagagactctacttcccttggtaatgaaacactttttcggtccccatgacccaaagcaccaaatataccatcaccaaaagtaaataattgaccagcagatgttacaacagcagtgtgccatggtccacaagaaatataagacacgtgtatgccttccaaggggccgtttactctttttggtacccagtggctcacttgatttccatgtcctagaaggccataattgtatgtgccattaccccatgtataaagatcaccagaaagtgtaacagcacacgtatgatattccccacaagctacaagttcaatatttgtattacttagagcttctataagctttggatggagaacatcagagtcaacaccatgcccaagtctgccgcctgattcttccccccaggagaaaatttcaccttgtttggtcactagggccgcatgtcgtccaccacaagctatattctgtacatcaagaactactgcagattccaaagctttgggaaatagagcatccatttttacacccaaacaactcccaactcgatgattcccaccacccaaaacaccatcacctgtgccttccccccaaatgaaaacatcccctagagcatcaccatcatcatgaccagagccttggctagatgtgctaacagcactggatagactaactctaaaagcatccatacccattgtcttcatgtgaccatgcatactgtctgatcctccagatgacacagaatgtactgaagcactggcagaatctggagggaagaaacccttctgagggacagcatacaaaaccacatccaatgctttatccaaaccattcttaggggggctctcgtatggactatgaaggcaaaggtgatccccactgtcctgaataggacaaataaatattattttagtaaacatattcaactgcaatggagagaaaaagggagaaaatagaagggacataaagaataagtttataccttttgcaggctttcattactgccaaagggagaattcaagggagaacttcttctggtgtatgtccgaggactattagcctcagatggaataccatcacttcttgactctgttctccacttccggtgatggctacgagaaattaatgctttcaaaccactgaaccaaacttcagcttcatctttatccttgcatatctagtagaaaaagaatcagaccaccagattgtgttaaacttctgcatacaaatacattgatactgttcacaatatcaataacatctgtacaagcaaagcaacgggccaactgcagctaaaaattccaagaggagaggaatgaagaaaactcataccaagtccagtgacctatcattgtagataagagaaaatgactggtattctttctcaggtcgtggatatctttgaaagataggctgaaaaagtaggagccatgttttatcaatcataacagagaacctaatcacttgaaatgaattcactgtagatgctgaaagtcaagaaagcatgagtaatggctttttagataaatgtcaacttattagactaggacactgaaacagcacacaacatcatgtttctcaaagcaaaacataatctaatagttaccacaaacaagcatattgtaaactattcataatgctaaagaaacaaatccttttactgtagatggataatgaaataaatgatatttatatatcttgacttccagcacatggtggttacactcacatcaaaagtgcatacagagaaaggtgacacaaactgtattagtcatacaaacatcaaatttaacagaactgtcataactagttatctcaacatgataaggcactgttggctaaatctgaagaagcaaaacagtatcgtgactttgcactgtcaatctaaaacttactgtgcgttgcccagatataattctagagacatgactcagtttaaggtgcttctcttctttccctgagaaccatatcaaaacagattcatcctgaaaaagtagagaaggcaaatcttattttttggcaactggaaaacatctaaaaacaaacttcaaattatgaaaaaatataaataaaccagaagcaagattaggggaataataagataatcaaatgactttcaaaccatgaaatgacatgaaagtgattccataaatggcatgcataatcataaccaaatacaaaagtgtttgatatggtgtggtggtcaataatacggtaacatgcatacttaccttcaaatataccttcaagatatgtggattagaatgcttgctttaacaagatttggtaagtttttcaaaggcaagtttcccattttttaatattggcacaatggatgtcttaagcagatcaaacattctcatgcgggagggttgtatccaaccatacactagtaaattttccctgtaaactagtcagggctgcccacttacaatggtttactaaaagcaaaatcaagttttcacattttcaatttgttgctgaaaattcatgttaagctcaatgccataattatcgtgactttatcaaattttcaatatgttgttagtgcaaacacctttgaaaacctaatcttaaggcaatcctaattgatgttaagcaattgattaatctttctgtaatatttgtaatttttctagtagaccatgaagattttagatctcttaattttcagagtttaatttgtttaacaagtacttcacatttttgctcctctcttcctcactatgtcattcaacttcaaggtcccctaccctactatccattaaaagaaatattttcaccactatttaagaataaataaatacaaaataaaatgtagaaaaatcaagggtttgagctttgttttgaaactatacagggacaaagttattaatgccaaatacaagtatttaaaacacacacacacacacacacacccactttaacaaggattaatttgaatctacagataaagagtacaaaactcacattggaaagacggaaggggcaaaacttgggcgttccccttcttccatacttgagcaagcaggcccctttctttaaagcagtaatggcctgtcgataagatcaataaaagacttcagccagcatatataacacatctgaagataaaagaaaacttataacatattataggaatcaatgaataagcacagttcatggataacattcaactgacaagcaccaagggcagctactaaagtccaaaaattcaacaacatactgtctattagtcaatataatagtaacagcataatgcatttccttgtattcctgtggcaaaacctggtatctaatacccaaacaatcgataaaagagaacgataattaaatagaaagatctccaaatggtcaaattagtgaaacataaattcaagaaaaaattaatctaatattcacatagtcaatatataaaatgtttagtccactaaaaaagcatccaaatcttcgaacaacattcagaagtcacaacacatacttaactacgtataaacaaactcattaagtaaattttaattataagaaaatttcctaagcaacagctcaaaatcaccaagatttttcactgccaatcataaactagtttgacctgatgataatacaatcctagctggcagtcaaactaaacattgcaactagacttccatcaacatctccaaaattttaagctcccagcaaaattaagccaattacctattcccaatgccccgaacaacaacaaataagaacattaccaccactgtacagcgcacgcacaccaatcagatacacaaaatctaaaagcaaacagtactccagcatgaaattcgaagcacgacgctacagagaaaaagcttccaaagaaatggacaaaacaaagatagatagatagatagatatacacctgctcaatgtctctttccacgggaccggttctgctaagatccgaagccattctactagtccgcgacatcacgcaaaaaaaaaaaaaaaaacgaatagcactaattagaaactttcactctctcctcaaatctaaacactaatctttcacattcacccgttctcatacccgaacccttccattcatcaattcgcacactcaaaccctcgctccaacagctccgagccttttccggcgcacgaatccaccataattacacctccgtcgcgcagtcaccgaactagagagctgctccgctgcttcatgcggcgcgggaactgctccagcgtgctccgaagcagcgattggcaccggcacgaggtgctaggttgcggcgaaaggaagtgatcgaggttgcggtggcgatgctccgtggattccggtgatggaggggtcggcgagctcgcggcggcgcggcgaggaagtgccggaaaaacggaatgggagaatctaggaagtatgatctggaaaatcagttgcagaggggagagagagagagagagaaagcggagtggagttacaaaaaaagcataaaaaagaaacacagtgtcgtctctatggctgaggagtgagtgagtgtgtgagagagagctcaaaacagaagcaagctaaattctttttttttttttttttaattacgaaaagtgaaacggacacaggaatcgccctaattgtcgtcgaaatttacgagtttgcccctacgctacgcttttatttaattattattattggtttttacgttagtgttctgattaaactaaatgattttggttgattacaggcataaggaaaaaagtttaaaaagaaacggacatatttgagtaataaataaatatttttaaaaaaaggataaactggtcatggttgacttgagtcaatactatgagtattattatttattgctgataaaaacaaagcacaattatttaaaaagagaatttaaaaaatgaagaacaaaaaaaggtagctttagaattatacatgtgtatataattgcagtgccgaaaatgccggaatcgctttgtcctggttgggtggcggtgactaaagatgagattatttcatgattaatcctttttctatatatggagcagactgtaatattaaaatgattttaatttttatattttgtaagagatgccaataatatttttaaagttaaaaatatttaaattataaaagatgtataatttaagaagaaaataagaactaaaaaattaaagaaaatgatttttagaatataaattattgaatttggattaaaaaaattaccttaaaatatgaatatttacgtttgttttcctttaagttagaatcaattacctttgcacctcttcatttaaaaaaattatacttacctctcttgcattctcctaaatttattattctctgtcccaattataattgctataagaagaaaaaatctaatatatattatgtataaaaaaggttgaattctaagaaataatgtgacatgataatctcatatattttttaatattaaataatattatttaattcaaaatccatgctattactctacttaaatagattctattttatcattcattctatgatatattactattctattaaatacaaataattttatttttagaatttttattcttttattcttaatcaattattttattcatcttttagtattttttaataacaattctaatttttttaataatacgctaaaaaagttgaatgatcaatttattttattgcttcttagtattcttttagtttttttaggcaatacgctacagagcaactcatgtttttattatataattaaaaattataagaatgaaatataaaaagaaaatattaaatttataaatcatatttaaacattaattcataaaaaatgtacaaatgttaaacaacatttgaagttataataataatattcacccatttggaataaatttttagttcaaattatttttttgcttatttattcaattaaagaagatttttattattatattctaaattaacttatttgattaatgtacactttttcaattaacaatatatatatataatgaaagttttattttttgagtcatgttatgtgtcatttcatatttatttcctccaaataatttaattaatgtaaattttatatttattctattttcaatagaatcaattaaatcaattataatacataaaaatcatataaattggtatattcagattttatatttattatattttctaattttatataatagcttgaaaaaatcatgtaaatttatatgacatatttttatttgatcaaagtaaaaatgtagtgtatatatatatatatatatatatgattattggtatattttaaatatagtaattgttgctaaaagtaatttttatctgaacacaactaataaatagtcgtttatgatgtttttttttaatttgcaataggtaaaatttaaattaatttttactggtatattttactattatgaaacatacatttgtccaatcttaattgattgtccaataaaaaaaattaaatcaatattaatttattatatatttattgaatattatatattacaattaaaaagttttaaattcatcacaaatgtgtctataaaatatattaaatatttattttcatatatattaatataaatttactaaaatataaactaaataaatatattaaaaatttaaataatataaaaaattactcttataaattataaaatgtgaatttaatacatatacaacacatatggaactaaattatttgtagtaattgttatcttgatttttcaaagtaatattaattatttattttttacttatatcccttataatatttatgataaacaacaaaatctataaaaagaattaatgataatataagattaattttataaatttattattcttttcatatatctattatattttgttgtctgtgtaaaataagttagaatagttattattttgggaagaaggaaatattcttgtacatatcatgtgcataatctagacatgaaaatagagaaagtaccaatgttttttttttaaaaaataatagacgttaatgtataaaaaatataagtataatttttaattgtaaaatacatatacgttaatacgtgtaactaatgctagtttcgagaaatgtgtaaaaaattgctagtttcgagaaaagttgatatagttatttattaaaaagaaattttaaaataagcgtgttggtgaattaaatacttctgactaaaataagagaaattattattataactaaattattattactattcaattcaccggtgttcatctgccctttatcatcatctgaataacgtttttagtttttactatgaaatcctctgaagtctgaagcatgtacacattaacacttaatacatcatcatctatctgagatactgagatgcaactatcaattcgaaaacccacgtctcacttttggtgtgacagatgaaaattacttaaattaatgaaaaaaaatgtaaagatgttatattttttaatacttttcatccttatcgtgatggtgctctaaaaattctatagaaccaatcaatttgtccgcaccttgactaattcaattcattctttttttttgtaattgactaatttacttcttgatttggataaaaaggtccctctccatagattaaaaataaatgaccatcattttttactatattcttattattataaaattaacaaaatagtaaatgataaaaagtttaaatacgtactctcttaaatgtagttatttctagttaaaattcttacctgtatttacattcctacttttctttataatttagcaggcatataagacccttaatcagtgattcgaattattttattcccttctcaacgtccactgaacagtgaccactataaaaaaaatgtggcattttattacagttatttatccacggttgaagtaatatataatgactaacagcccgcgtgaatcccttttttttttaatctctcattgtctcactaattatgtttgggctctacaaactcatttgttaatttttcaaaatcacttaatttcgctcaaacttcatcctaatttatcatgaataatttacctagacttgggtctatattagtgacaattatcatatgaagacttcggtttgttaggacggtagtagcttccttaatcaacccattattgttacagtcttattttggacttctgccattacttaaattacctagacttgggtgtgttagtagtttcttcttcttcatgttttcctcttgtaactattccaccattgcaccattcatcacatatcaaccttgtaaggtagtctttactaattcacacacaagattccccatgtttcatgttgcatatactcaagttagggcacaagttaatgaggctcttgcctcttggttactagactctctccatttaattgttattagcaatacaatggttgtatagcttttccacaatcccttttcaaaattttattatgctttcatgttgtttgtcgtaactatgagaatcacttttgatttctttttgtcaacgcattgagatgtttcaatatgttattgtttttgcttatgtggattgagaaacaattcctaaggttgacctatactaagaatttctaaacttatatttttaactccctccaaaaaatattaccgctttaataaaataaataaattgtgtatgataaaataaatttatttcttttttactttattacattttattgtattttgaatttgttaaaaaaataaaaagattaagatcgatggtaaaaatatgaaagtttagaaacgtatagatgaaataagtgaagttaataaaacacataaaatattttaaaaaaatatcgtcacaattttagagaaagatctgtaaaacactctctaaccatggttgttttagagatcatagtcattaattggttccttggttttctagctagtcagaacctgaactacacttaaaatattgcttggcataactaggtatcaatcttaaacttagtacccccatcttatacttataaatatcaacagtactcttcatctaacattacaagaaatttatgatttaacattagtcaaatgtaactctaaattgcaaaagtcgacgcaaaacgcaaaatcacactgagcgtcaaattttgcatcgattcttcaacaaattaaacgttacaaagctcaaaacaaaatagttgtgtttgcatcattgttgacgcaacatgacattggtttaaaaatcaaagctacctttaaaacttccttcaaaagtggtcaacattatgtgtagtgaccacatggcaaactctaaagtaacactattaaagtatgcattcggtttgtcattagttgtgtcgacaattagtagttaatgctagtttcatcgatatatgactgacgctacatatgcataccacgcaaatcacccacctaactcaaacctttgtcccaacttaataaccctcattaaccatttatgaatttaggaataaaagccatgcaagtcgtggtcgatgaaaatgaaaataatcaacctcttgagcaattcttattttttgttgaaaatataaaaaacacaaatcactataaatattgttaaaataacatgagaaaaagctattttaatctttctagtagggttgttcgcggtctggatttgatcgattttgaagcaaaaaaccatccgatccaatccctttggtttggtaatttgatcatccattcggtttgaaatttttttcaaatccgatccaatccaatccaattttttttggtttggatttgatcggttttcgattttttaaaaagtctaaaaataaaacttatgagatttatttttatcaaaataaggagtatatagcataaacaaacatattcatttgacaaaaacaaacatcattttctaattttcattggacaaaataaagagcaatgaaaccttactgcaaacacccctagtgtgttttgtgttggggttttggtttttgggctatgatggggaattggcccaagtagataaagggtaatgtaagatttataatttgatcgatttggattggatcggttttcaccagccaaaccgaaaatcgatctaatccagtgaaaattttcagtttttttcggttttcagtttttcgattttcggttatcaatttttcagttcggtcactgcagtttgcatcggtttggatctgttgatgaacacccctactatctaggttgagtattacaatagagaaaacattgttttcaaaaggaaagtttggtctaatagggaaaacaaactttaacgaaaaatctctgatgactgtcattcctataaaatgattcatctatggagaatttgttcttgttctatttattttattacaacaaattgttacttcaatcaagcaaaatcatgtcaagacaataaaatttcatagtttagacactctcattctaattgtttgaatcttataagaaattcaacaaacctttcaaatatttcatttgtctttgaaataattagtgacccttaagcatgtgattaaaagtataatttctaagtttgtgtatataaaaaaaatatctctcaagagagattggctcctttaagagaatagtgtctcattatgactagatatcccatgtttaccaaaatagtttaaattttggataaaattataattttttttaaaatccatatcttaaaattagctttaggtttatttagagacgacactaacgttaatatgttaatacatcagatttaaccgaaccatctattaagctgtctccagcacactgcaggctgcagctatggcaataattaggcactgaaagcgcagtacgtgagcgggttcttatcataagcctcactcaccctgtttgtattattttttcaaattaattaactttgtgggttgctttcaccctagcttgtttcatgaggttgatgtgtgtgaagttattaaactccacacacaatcaagtaaagtgatgtaacaaaataaaaaagatctagcaaatggggacatgcaaaaacccatcaattccattgggtgagtgtgtgtaaaaaactaacttcaaattaatcaatccatgcatgtgcaccatggctggagttcacaaacacccatgataccctttgacaatggcacttgtctttccaacccttgttagtgattgagaccaacaccactgtccagtgtggtacacttttttggaaaagttggtccttagccacaagtcatagaaattcatggtcccctattcttttcctcaagtggtcctaattgccctacactttctaacttctcttagtcccacattcacagaatttacactgtagggtgatggaacagatgcaccctttaccacatgatatcaaaagcctttaatttgctctcgatcgaatccccccttggaattcataatagttacgttactttcatatcatgtgggaaaaggatacatgtatagaatttggaatgtttttaaaaaagtacgcatgatgagaaaattcaatgtatagtttacaaatttatctttgtttctcctgctgtgttgaattggctggagataaattaaattgacacaaattacatgagcgagcatgtaagttcacgcacaaaaaagattgtacttccaagagttccttttcaaatttatgtcctctgtaaaatttatatatccatgaatcactacctatgctaaatttgatatgcatctttattgattttggttcgaatattcacacgttaggtcccaaacagtagtatgttaatcataataatagctctggattgatccaacatatttattttaaggatcggttatgagaaattgataatgagctgaaacttgcgtatcaaaaataaaatttatctagaatattctagcatgtcagtgacactaaaattcttctgcgttttaaacgagtcttttatttgccaaaataataatagagatttgaatgtgagagtacaagtttattgtaaggactcaccccacacacattgtcacttgaatttgccaaaagaagagtaatactatcgtttgtagaggaatacatatgacttgttgaaggggtttgaatttattaacatataattgttatgaatgtaatggttaatgtaacataagctaattgtcatgttattagttaatttaaatcttaattatagaaatttgcagtgcatattttgcaaaaccggtacgtgtcattttaacctaatactaattaaacctagtttagatttgattcagatcggtttgcattgattcaattgtataattaatctaataattctattacctaactaatttaccaatttagttgttgaatcaaatagtacgacttgattttgacaacgctactcactacttatatccttatacataatacatttgctcatgaagaatattctgaatgctgaaccaggaaaggaaaaataaagataaagcaacactcttgagatttacaataataaaactcaatactcgatatttttgtaaaatgaagttaattaaattaagttcagataaaagcaaaagctgaagataattaaactataataaaatttattagcatataattatgtaagttaagctatattttcatgacatggtgctattaaccaaggaaggacattaatatctaattatttgaaatatggggtaatgtagagttagatgttcttcaaattgaagtaacgtttcagttcgcaattattttgtgaagtcgaccaaaccttttaaaagcttatttgtcaaattgacctatatgggagagagaacctatcattcacccaatgtttgcattagtgctcttcttttaagcatgactattgtgagaggttactctttcaatccattctgcgtggctaactgtggtccttgccctacaattattaaagagaaactatcttttggcgtaatttcatgttctcggctcagattcatggtatggtacgtgttatatacataattaatccccaattccctatggaggatctgcgccatatgatgtcaaaattcatattcaagttagattttcttagctgtgagtatgggaagttgacttgaatctactctagggcatatccatgatacctttcagtttttgaaactgtgatgttggatattaattttaccagaagttaatatttgtttgcaaatttaattagtttgatgattgtaagaaattatataaatgtacaaattgttgagtccttaactaatttgatagtaacacccaatagaaagagtatgaaacaccttttcataaaaaataatgtatgatatgatatttagccatttgcattcacacgtacacgtacgcacgataaattgtaaagttttaccaaaacgctaccctataaaaagaatccgacacatgattttagccttaggtaccctttaatttctttgattttcaaaacaatcctgtttttggatgcattaaaaaacatctaaacatctaatatgcaagaagggttgggcatacaatttatcaactgaatttaagagcaccacaagttaggtttagaaagtttaataccctacactaattaaacttttaatgagcgaaaaccgtagaaaacacatgtttatttgttaagattgatgaaagtcctcctcgtcacatgctttctttggtatccaattctgcgccgattgattaatttagttcatccttatcttatttttatgactaaaataaagaacagggtacgaactactacatacatcatttaattaacagtttcctagtcaggtatccattgtactaggatttggtggttgatggggaaaaaatccaaaaggtaagaaccaattcacacaaaacaacatacacatttgtacattttacataataaaatagcattcggcatccaattggcctctggattgtgctaatttaagatgcaaattgaggagagatttctagatgcaccacaccacccacagtcccacacccgcataccctaacaaaaggttggtaggtctttccgaattgtgatttttatattttttatgatagaccaaaaacacaaccaaattaacaaatgaagggtccaaattcaaaatcaatggcagaaggatgtcccaacttgagattgaatggttagatttctctgtatattagccaggaacagtttcctttgtttgtattcattattttcgaaacatatgtgagactttttttttttttaatcataggagaatgaggaaggaaggaggaaatcataaaaaaaaaataaaaaatggagacacaaggatctgatgagatataaacatgtttctaatccttccatatataaattagaaatagctatttccaaagagagtatttttggttactatttaacgaaaatatttttagcttttttctttaacaaaagcgtttctagaaaatatttttaacttataatctatttcaatctatcattttcaatatttttagttctaacttgatttcaatatttttgaaaagaaattatcaataattaaaactaacattatataataatataaatatttatcataaatctaaaagataattatatattctaaaatatttattaattaccaattttaattataatataatttatatatttacaaatatgtatttattataaattttagttatatcgaataaatatttatactgtgaaatgtacaagctaaagtactagttaaataaatactttataatatattgaataataaaataatacaagattattaaaaaattaaattaacatgaaaaattctattacacgtcctacaagataaaaataatataatgatatttaaatgataataataataaattcaaatgtagatcctatatatatacgtttatttagttaaataatatgagaataaaaaaatagttcaagttagttcttatgtaattttgagcagttttgcttgatttttgactgaatttttactatattaatactttgttgggacctctaacatggtaacacgtggaaactcaatatacctctaccatacgcaaatcttgccctaaaacaaagctcttcctaagttcctatatttatactttatactttgttgggacctctaacatggtgacacgtgtaatcctgaagtttctccattaagattcctaaccctgatatgttaggtgtcgttttccttcccaataaaatggactaagctctcccaagaaagggttgcttactttaggttcagtaacaagaaatcagtttttccattacaaataattcaattattgttaagcgagaatgataattgagtgtgtttaaatagcctctaaaatcatgatagattatggtgaggtggttcaacctttattttgaccaaatttttggatgtttggattattatcaaaatactaataaaatcaattatgattaaaaaaatcatgataaagttaaaagtaaataaaaataacttctacttctaccaaaatcaattttacaataatcaattctataaaaaaaattgtaaccaaagtattccccagccaaaagtcaaagattaatctttcgagatactgaaatccatttaagggattgacctctcccactagatattttttcatatatacaagggaatcaattttattcaaaatcaattttatcaccgtcaattcaaacacacttagtacggggaatatgcgccatgaaactaataagttaaaatcccaactaccaatcaatattatcctcactagatcgatatgagtgttgggtaaacaatacaaaactcatgaaacgaattgttaaatcataaagtagaagtagccaactctccaaagaaagagatcaaattggagcaaattaggatgccatacacactaccatattaaaccaataaaagacaaatgacaagtatataagctgtgcattatacctaccacggacagcttcaggaaatgagattttacatccaaaaaataacctgggtgtacttttttttttacagaggcaaataggtgagcacaaaaaacagcaaatggagagagtcactgccattgctgccagaaacaatggttcccacgttacagagaaaatgtatgtgtctttttaggctatacatacacaatggcttagagaaatcccacacacttgttagcatttatcaacagcacttaataatccagtgaggaactggtgtcagcagtttcatcctcgctaaagctagaaggcaagtctgcagcagatctgcatgatcatataaaatgccattagaaaagaggcctctatacatatcccaaaacaacttgattgaaaactttctaaggaaaaatagaatagaaaattgtaaattgggtaagaccatgatgtgtgggactaatccatgcaaggctataggcttttacattgaccaaaaggtggttctagtggggaatttaaatacttgcactgcaagtaaagtccacccacatggagctcaatttactcactcggccacacctagtgtttagaaatcctcttttactcaaagaaagctttttagccaaaatcttactagtgttttgattattatctttttttaactaaacacacatgacgactggtgataacactacatgtttgaatgtttgatctttaccgctaacaaaaaattataattgatttccaacaatcattactgtctactgccttcacaattattactgttagcatatgtgcaatagaagaacccttatccaattttcacgaggcaagcaacattcatccgaaaacaaaaattctaaacacaaaaataaatactactaaggttgtatttggccccagcttttttaggtttcttttcttcttaaaagtaaaagctctactaattagcttattctatataaactttgtcttttgggtttaggatcattaaaaaaactagtcatatatttaaaagcttttttataaaaaaaaatatgttggcctaacttctctttttaaagaaaagagaaacctaaaataaaaagttaagtcaaacgctacctaaataaacatgcacacaatctataaatttataaatctataaattttctattgaggacctgagtgatcggtcatgagagacaaaaacaaaacatgcatatatacccacctctgaattttcctttgttccatctcagcaacaggtgattttttcacattgtattgttgaagcatgtcaactttagctcgttttgcaacctatgcatatagtaaagcaaaacatcatatacatgcttggaaggaagggaatgagctcaaaaggaaatcaaataatcatattccaaaaggaaaatttagatatctaaaactaaccatgatttcatttgaaagcatccctgctccatctacattgcggtatgtattttttgctttcctgtcccccttaaacatctcttcctgcacatttgacacaaaatttaagcattttaaaccatctgtaagcaagacaaattgaccattacaaatataacacacagagggtgtaaatatattaatgaacctttgccatcctagcagataacccccgttcttcagtatccataggaacacgggaattacggattgaactagaaggtttagattttacatgttcactcctttgtatattctttggattgatattatcataaccatgcagcatcaagcctttctgcttaactgcaagcttctcttcatagtgatcactatggttagaagcagaatcagatcgcatcccctcaacaccatgtttagtgctcattctatgactcttggtgctattataagcagatgcttctccaggagagtcttcatacaaatctgggaaagagttccttccaggaaaatgactggtataaccatataaaggttgcctttgttttatattctggtgcgctttcttatcttgtttatcctgaaaatcagtttcatgcgaggaaccaaagtcagctccttccatatgcagatcttgggaactaaatttagtataatatgaatcatatctctgcaaatacacaagtaaaagagagtgagaaagcagggaaatttgtatcacataatcaatgttgttatgtttataaacaggataagtttaaaactgctcaaccgcaatgcaaagatttacatgaggattgagcaagcacaagtataaaattactgttaatacttataaagcaaagcacagcttctagtccatttaaaaatttaacttgcagtcagaataacttgaaacaatggaaaggttgcccctagcacttaattttttctttcctcttaagcatctgtaagaagtaaaagggtcacatttagctcaataaaaataaacattccattttagccacattttacttatcattcttggggaatcaccattctttgttttaggatagaaatctcattccaagaataagctcattcccactaagaaaggaatcttttgctattttgtcgagtcttgacaaagtttatcttaaactattttaacaaaatgaaaaactgtccacaaattgtgtgtgcattcaactcatatgttgcataatattatattgttaaaaaattaaaagtaaaatttattatttgcttttctaaatccaagattatttttgtcaataagctattctattcattccattttggtctaatcctaatacaacaaacaccaactctgtctggtgacttgtaatgggaataaccactccaatccatttctttctcattaccactgattcctaaaccataacaatgtaccatatttcaactatactacataatattctgaagccaatataaatggcaagatgatagcatccccttttcctaccactttgaagaaatccaaaacttaaaaatgagagagagagagattaaaaagaaaattctggtaaggggtgggtgacaggatctttggtttggtaacaagaggtgattgtagtgctatcaaaggtcagttaaaggtagggaatggtataaaagaatgtcatataaattttgagagttgcaagactgatgtcaaaagaagcgaacaacatggaaatcaatttcagctcggtttggaatcataaagttgattatcatactcatctcagtgagggacatttgtgtaactgcagttttggctttgtggagtgtgacagaaaatattgaaggactggatgtggtggtatttggtgaacatgggaaacaacagatataaatcaactttatcatatgttttttcctctgtttgtaattgcattacagaagcagcacattactgtggataatttcttgtaatggttcatccaattcgggtgcaacttgtgcttgatattggtcttggtaacaaaattatctatttgcctttcaaaaaaaaaaaaaattcgggagtcaacaagtcagagttgggttttgttctgaatcttctgatacatcttcagggctagttttaacttttaagtaaattcttttttctcatcataagcttgtaacataaataattaggtcactgtccaatctttgaagcatgtgtcatataatttaaacagacagtatttcagtgctaaactcatgaaaaatgaattagaaaggtcacttacagagctaagactgggttgtctttttgcagcagagatttctggagaattcggaagcagaggatttgtaacagagtatggttctgcatagcatccattagattataaaggtaagaatctcaattctcaatctactcttaaaatgactcaatgcagttagaaaaatggtctagagttaatgaaacgaaacagaaccctcacaacttagctaagatgaaatatttccagtaaggcacgcaaagagcaaaaatcaactatcttgaactaaacatgtaaaaatagcacattctgcacacattatgaaccataaaaggcagcatcagtctttaggaataagctttccaaatttaaggataacaaaaccgcaacttcttcaatgtatgtgcgttgggcatttaaaaatcaagcaaataaaaatgtaagacatcagcaaaagaaaagaagtaaaatgatctacacaaaggaacaaaaccttgtagttttgtgaagttcttggtatccaaagccttagatccttaaaacactagcttatgagaagtgacactcttttgacaagtgctcttaataatatagaccataaattaatcttataagattgtcattgaccctattagtatcaatactaagaaggcatcagcttaaattccgtaaaagcatctaaatcatcccaatgaatagcatataaacatgatgcaggttatttggaattggaaacacttatttactgttccataaacaattcatcccctatcacacccagttctatctttaaacattcactgcctatgacaaaaaaaaagaataatgcttcatacgcttttttttttcacaatttgatgtgtaacaacacattcctttaacccaatatggcattgtttcaatttcaacacttaacaacatttcagtattacaaaacaaattgaatgagacatttaaaaagtaggaaaatagaatatggtgcaacctaccattagctggatctgcagtttggcattcaaatgcccctggaggaagcagatcgaattctataccaagtagtggaccatcttccagataatgccttcctaactgcttcttaacagcagttatagcagcatgttctatatcgcccttcactttcaaatatcctgatggtttgtgtcccatattaactgcacctttgggatttaagggtggaagagctccattaggtgtaagatgtctagaaggctccatatcatatggatcctgaccttgagaaaacaacctttcttgcaaaaatgagctgctctcagatgatgtgtcacccagcccgctaacattttcaggataacggttcctacgtccatgactcatatctgcaactgacaattcgtgattgtagaggccatggctctcaacctccttaggatccagatacctgtgatcagcatgcttactgcttccgcatgaatcttgcccaagtccactgccatgatcttggatgacaccacttgaacgatcttgtcgcccattagcaacagcttcatctttcatcaatcttttatcttttaaccttctgtggcaaaaccatccagatatttgcttttctgtcaatcctaactcctcagcaagtactaatttcatttcctctgtggggtatttgtgctctggaaacaaaggtaaaaaaaaaggaaattgctaaaaaattacccccttggaaaaggcattaacacccatttacaaaaagtattcttaccattataaaaattctccaacgccttaagctgggccggtgttttcaactttcttttcttatttttctcattggagactttattttcttctgattgcaattcacttgattctaaacaccaacagaaatgcaggaagtttagtacacgtgttgtgttggaatggaaaaaataatgaccgtaatatatgcaagaagacaacaattaaaaaacatcttatctcatattaacctctcaaattgatccacaaatgttattgaatcaaaagatacaactatatgctgaggtgctgaacagttatgacaatatggaaaaggatgcatgcatgggcaattgaagtcaagttgctcatgtgaaatgttgataattataagaaccagaaagtttctttccttaaatttgaattaaaaagtgaattgtttagatcaaatatttacaagaaaatgattttgcaattaaaaaaacttgggagctgcttggatactatagagtatccttcactaacaatgtccaaaggttaggaggttgttccataggatcactgaagagttactaacacatagctaatgaattttgtggtcccaagttactaagtccctgatctctcagtaaatgcaatgcaacaatacaagctctatttatatccaattgataacactagatactcttaaagaaattgttattattaaatagcaaaaacatgcataaggtctacactatgagggtctatatatagaccatcaaaataaagataaacccctaaacataagataattataaacacaaactaactaattaccctaaatatgaaatcaaaattaaaatactaaataatatatatttagatcataatccaatctccatcataaggcggaagggagcggcaatcccaagagtgagtattgtgcagttaaaaaaatcagggaagtggacagccaaataaatcgaaatttagaaagtagctggagaaaaatctgttcattatctaagatatcaatacattctacttctatacactcgtgtcatctacccaccacgattttgccacgactcacaaccactagcataccatttttcatatgatacaagtttgatacaaccagcttattacatgaaactgatcagtacttgttccttatttctttgagttttctaatctcaactgaacaaagaataattttgaaagaatttataatttcatagagtcttccgcagagaaccacgatttgtgccaatcaccaccaagtatgaaagaacaagaagacgaggaacaataacaaccaatcctaattccacacattccacatggaaagtagatccaagcctcgacgcagtaaatggtcattgacagaacaaacaaaaacttctccaatccatagaaaaagaaaacgtggaagagaaaaatgcacgaaaacatcaaaaactaagtttcaattatgataaaaactaatcaaaccccattggtacccttcagtttgactcactttttcagaccccaaataccacaaattgaagaccttgaagccatacccaccattacaacaacctaacacaaaaaatccatattatgggttccaataatcaatctcaaagcatggaaattgaagtaatctgagaaaaatcaaccacaaaatcaaagacccaaatctctgataagaccaaagttgaagaggaaaacacaataccttccattggggtaaggaattgccgtgaacaacgcccctctgttaaagttttggggcgaaaggtgcaaaaaaaatcagtggcttgtgagaaaagcgaggacaggacccgtttacggcaatatgaaaagagaatgcaacaacattaacaaaaacgtgtttgatgcaattgaatgagttttcaatttgaccctctaactccgcttaggaacagagaaaggagcttctggtgaagttggaaagacaaagggagaagaaacaaattcaattcgtcttatgtccgtattttgcttgcttgttcgttccaatcaatctttgcattcctaaaaaattaattaataaataaatcagatttgcctccactaaacaaagtaaaatgcattttaaataatacatgttattttaatagcaattttaatcgcaattttaatcgtagaattaaataaaattgtaactaacaatcttaatcttaatcaaggtagtaatatgattgttattttattcttgatcttaatgttattttcgtcctcgtacgttctagatttttacttaaatatagagatattatgagtggacactgaaaagaaaatgattaaataaaaatggaaattatacttgttagtgtgtatttggaaaacggttatgtccaacataactcaagttatctctgattaatatatagttccttcttttattagggtttcaaaaggtacaaacagacattttgaagctacgtaacgataattcaaatacaccattagtcatgtcttcattgtgacaaagtgaaagtcgaaagaaaaaaaataaaaatgataaagaaagaaaaaaaagttattatctatagttaaaaagtgaaataagtaaattcaaatgcaatcactttttttcgaataattcaaatgccatcattgtacaaatgttcatatacctatcttatttaaaattcaattgatgctgagatagaatatgataaactagtttatcttattttactaacatatactttttagtatattcactatcttgtcttgttttcttagtatcatataataatataataaatctataatatatatatatatatatatatatatataagtattagttaattgttttaaatatatagatatttattattattattaaatttttaagaaaaattagtttatcatactctaattttcttatccattatttatcggcatactttatatcttatcacaggagataaattataatagaaaaaaaaagacactttttagaatgaagtattttgttttattttttttcttgacaccattgatattattattattgttgttatcatgtcattattattgtcaacattaacaacaccaatattattattattatcattgttattattattattgtatttttttattataaatattatcatcgcttgtcattattatcatcactacatcatcatcgttatttatcattatttaatttgtgttaaatatatgacaaaaaaacaaaataatattattcaatttgttgtttaaattgtatttgaccctgttttttaaaaaaattagtcttttctttagaaggagaagttgagccaaccacttttcatcaaaagttattataaaaaaaggagggctaaaaacacattttataaccgtctcctaaccccatcattttcctctctaacacattcattaaaacacatatataaacttttgcttgattaactttgattaggtttaacaagataggtgtacttaggacaattacaggagttaaattattttaataattaattgttattataatcaatataattataattaagttgctgaaaataattttaaaataataaatttgggatttatttatatgtataaaaaaatcgtttgaatgaagaaaaaattatataaaaataattaaaagagaaaaaaattattaaaaaaatcataagatataaattttcaattcatgaaaacaacttatctttttcattaaaaaaaatacttattaaattgtgtttaaaaatttaatttttttaatgatataataattttttttttgaactaactgtaatcacaaatcagattaatatttgacttaatgaattaaagaatattttaaaaaatccaaaatttttatagataaaatcaatcactaatttccaagcatggattgaataaaatcttatacataaatcaaataatagaagaatagaaaaaactttgattgagccacttaaattatatataaattctcaccataccctcttagacccaagaaaaaaaaacatataatttatttttcatagaaaaacaaaaaagtttccatgtcatgctagtaggagggttcattcccagtgttgttccttccgtgtctggtatttcccttggcatcaatggcgaagacattactgactcataacctacgcttacacatacacactctcagaccttcatctttccttcttcatcaatgtcaccgcaactccactcacgcgggtcccacagtccacgacctcgtccgtgcccggaacctcccagaagcccaatccctcctcctccgaatgatccgaaaacgcggcgtttcgcgcgcccaactcatcgattccctccttccttcttctcccactcccactcccactcacaccaacgccaccgttctcgatttgcttatcagaacctacgttcagtcccggaagcttcgagaaggctccgaagccttccgcttgttgaggcaaaagggcttctccgtttccatcaacgcctccaacgcgcttctcggcgcgttggtcaaagtggggtgggtcgacttggcatggacagtgtacgaggatgttgtcgcaagtggcacaacggtaaatgtctacactctcaacatcatggtcaatgctttgtgtaaagaggcgaggttcgacaaggttaaggttttcttgtcccaaatggaggggaaaggtgttttccctgatgttgtaacttataacactttaatcaacgcgcattctcgtcaggggaatgtggtagaggcttttgagctgttgaactcgatgtggggcctcgggttgaagcctggggtttatacttataatgctattgttaatgggttgtgtaagaagggggattatgtgagagcgaggggtgtttttgatgagatgttggggatggggttgagtcctgatgctgccacttttaatcccttgcttgtggaatgttgtaagaaggatgatgtttgtgaggctgagaaggtttttgatgaaatgttgcggtacggggttgttcctgatttgattagttttggatctgtgattggggtgttctccaggaacgggcgcttcaataaggcgttggagtattttgggaagatgaagggtgctgggttggttgctgatacggtgatttataccattcttattgacgggtattgcaggactagcaatgtggctgaggcgttgaacatgcgcaacgagatggttgaaaagggttgtgttatggatgtggttacgtataatactctgttgaatgggttgtgtagggggaagatgcttggtgatgccgatgagttgtttaaggagatggtggagaggggagtttttccagattactatacccttaccactctcattcatgggtattgcaaggatgggaacatgaatagggcgcttggtttgtttgagacaatgactcaaaggagccttaagccggatgttgtgacatataatacattgatggatggcttttgcaagattggtgaaatggagaaagctaaggagttgtggcgtgatatggtgagcagggggatattgcccaactacgtatcgtttagcattttgataaatgggttttgcagtttaggacttatgggtgaggcattcagggtgtgggatgaaatgatagaaaaaggtgttaagcccactttggttacttgcaacactgttataaagggccatttgcgggctggcaatgtgttaaaggcaaatgacttcttggaaaagatgattttggaaggagtttctcctgattgcattacgtataatactcttataaatggttttgtaaaggaagagaatttcgacagagcttttgtcttggttaataacatggaagaaaaagggctactgcccgatgtcatcacttataatgcaattctcggtggatattgtaggcaaggcagaatgcgggaggctgagatggtattatgcaagatgattgactgtggcatcaatcctgataaatcaacatacgcatcattgataaatgggcatgtatctctagacaacttgaaagaagcattccgtttccacgatgaaatgctgcaaaggggatttgtgccagacgacaaattctgatgcttttaccgctgcagctcttgttacaaatacctgatataaaaggttgaatattctttcttttggtgacatctaaatttgcctcattctgttgtaagcgttggttttgtattcttgtgataattttacttattcagatgtatatttgttatgtgttattaggtctagttgtagactatgcctatgccacactggttctggttctgtatatcacaggaagcacaaccctggttgatgtcttctgagcccaaacataaaagtcaagccttcctgccctggttagtaacaaagaaaaaaggagacactcctttctcgtttattataactgttcaattttgaatgccttggtgttgcttgtttcatgcttatagatgtaatacagaataatagttcttaggttatcagacatggtttatatatatattttttgtatttaattaaacaatgagattctatcttgcaactttcaatttgaacagaagaatcctgtatgttttagatgcttggaaatgcaacccgtccatgtttctaacttctaagcatggtttgcaggagctaggagggggactccaccatcgttcatgaacttcagactaatgtttttgttagtataatttattgaaggggaagcctggaagtcattgcaattatgaagcatagcatgggagttgaagcattctttttttcttgctctcaagtagcatgagagtagtcactggttaccacctaaggtctggttcaagttagttttaatacaacaatcacattccaattaaagtttatttaacagatacacagaaatgatgtggaattgactgtggttggttagactgatataatcatatccatctttggggtatactttttgacagttagaaattgaggcaacaaattgtagattttttttttttttttttgtgatttttgaagacgatccacatgaaattgttttcccaattttgaactctttccgtattgttaaagtgttggtatatccactggttaagagggatgtaatctattggcacattaattgcatctgcattgtgacttgaaggccaaagattcaaatcctagaaacagtctgttgacactttggaagttaggatccaattgcaaggtatgagacttgagtcccatattgaaagtatgacattttagtgtgggatttataactgcaactagtttttgtgttgtgattcttctaaggttctcatcaattgtatcagagccttacactatgtctccaagctgcaaacaagtggtgctggttgcgatgatggcatcagtgtttgaccggagctagtggagtgtggtggagtgtggtggaatgttggggtccaatttcaaggtgtggaacttgagtcctatgggattctaacgtaaggtttatagggctttggactctctccaactaaaacgactagcttttgtggtatggttttccgtcatattaaatatacatactcttcacacatttgatgtttcgggagattgtgatctgtttgaagtccacacttggtacgaggaacttcagcaacatacataagcaaatcagctagcactttccttaacacatttgcatgatgtacagatgccagcattagatggtatgttgtctgagattcttgacattggcataacaacagcatgctacttagttataatgagctaccacgggctgtcttggatagttggatttaattcctctgaaacaaaactgtgcactctttagaggataaaagtgcaattgtacccaatggttgagattacgataaaatacacgtactatgtgataaactatggaagttttttaaatttcagttgtcaatgttttaatcatttatgtctctgcttcttatcagtccctactacccttattaagaattgtctacatgctatatgtgtgcgtctctctctcttacatatatgaaggatcgtagagattgttcagccattgatcatgcaaagagttattaaatatagtagtgtgagtgtgtataacactgtaaaataacgtctttaatatgttataaaataagttttatctattttattgaattatatagtattatcttgatgattatgtatatttacattaagtgtcaaagtaggcaaaattatatctatcataacttttttcaaatattaaagtttcatcaatgtaactgttatgctaaaaggtatcatatggcaaattttgtctacaaaaaaattatgcaatttaaaatctaattcataatgtattgcatcgtgaaactattgaaatatactaatgtaagcagacacacacactcattactctgacaatcataataatgatgatgatttaattgcagttctatattattttgtaagatgcaataactcatataataatcataaaaagaaaataactcgtctataaatttaaggttaaccatcaaaattttggttgtagttatgcttttcttattcatgcaagaaaatgatttttttttaatgtttaaatttaagatcaaggcccttaacaagtcttgcttgacgaactagcggacccgtagaggtctaaaaagaattggatcaattcggctcaatgaaccacactggttaggatgagtttcattttacacactaatttttttcgccaataccccatttcgttactgaaaaaggtaatctagaatgtaaaaatacattcagaaatgtccttcctgtaatgaaagtgagtgttggtagaaaatttgtagagtgcatgatgaagttttagccctgaccaaattaaatttcggaaactattaggatttatttggcttgatattgattttttcttttaaaattcatacaaatttagattaaaaaaaaagatattaatttggcccagctcaatgaaattcggataaagtcagataattagtttttcattttagtttaacaagcagaattggctcaacccatttaaaagatttaagaaaacataataaaagtgaataaatgatgctatgttttggctttgctttctttgtctgccttccatttgagcagaccagattacaatttgaagggcaggaatgatgcaatgtaatgactaaatcttccttttaaagaatggatcaattcacctttcccttcaagtttaaacaaaataaaagatcatattccatttcagacaacaaactagtgcagacacccaactttctaatttctattattaactattaataatcatattaacaatggaatgatcaatgtcggattttcatcattatgcccgtttgaatggtgagattaatgcacgtacgaatcatgattcggaatgtatatggacatgtagtttgttgagtgggatgatatcatgataattgaagtattcaaaagccttcaaattagaagcaactacaataatgtatatcggccgaaaaaataaacaagcaacgagaaatggattatgaccagaacacatggggtggtatatatcatcctttcagcttaatttgcttactcttggatgatataaatatttaaatgtcaatgtatttttgtattgcttaaaacacatatacgtgacggtatacgtgtctgaaaaatgaaagtacctgaaaatgtttatctggtttaaaatttaaaataacgagtatattgtttatagtttataaattcaatgtaactcgatcttgaaaaaagaactaacatatgtgtcgtaacaactacagccaataaggattataattttgataagttgtaggggttcacatttaagaggctgaagctaatacaatattttgacaagatcatttttgtagatcctaaccctatgtggtcatctctattctctggtgatacataataatgaataagaatatgttgatcgattccatagtttgatcacatatataaattaaatattacaactacaagtataattatattataaactaaatgatgttgaacaatatattttctaaaaacaattatatatatcaacaattaattatattcacatattatactataccaacgagtctaattcaattgtttaaacagattatatgagttattataaactctctctctctctatccatctttaattcctgtgcataaaaaaatattaatttaaaataaaaaacatttactattaattatcaaaatagttataagttcatttgacatcaaacaatattaagataactaattaactcacaaaaataacaatattattacgataacttaaagcataatgctaaccaaacccaaaaatatatcaaataatcgaatgcttaaacacaagccaccccattgaactccatggtaaaatggtttatatgtgattaagacaatcatcccccattatccccatcaagaaggtaccaagaacgacccacaatttggccacagggattttagtctattaatataacgacatcatcatatcattgctttgtctaaagatgacatgctaaattgtttctaattgacttgtattagacatgagaaacattgaatggggacctaattaagaatgctcctgcaagttgctcaatcagacaaaatcaaatttgcccaagcaagtgaaaagtttaattatatatagtatcaacccacaagcaggcattttttctttctttcttcagaaatatgttattaggagaaagagaaactgcggctgcatgatgtttataacggctgagaggttgagactaatgatgaaattgacaacgatggtaatgatgttcatacgctgaaaattaagagtttttcaaattttcaatgaacaaaggggagaatttcaatatagtttcattgtcattaattgctgatgatggaggagaaccaatatacatagatatatactgtggaaacggataagtatgtgatcatattaagtatgcttataaattatattatctttaatttgttcgttaatttccctttctttgactgaacaattatctattcaggtgcatcatataaaaagttaaaaaccacctaataagaagttttgcaaaatagtatgcgatggcaagttttaccattcttagtaattaaaaataaataaatatacgtaccaacaattattgtggcttggataaggacttgtttaattttgaattatatggcatttagtatagagttgttaactaagaatgttgaaaaatggcaactgctgctacatttgacaacaaaaagctgacagcataagaagtaccttgttgttgatactaagggcatttccagtgttaggagtttatatggatttcttactgacttttggtgggtcctcttttaagatacggttgcttatataagatgcttaacttaaatttaagtactccaagaaagagaaaaagtaagaaaggatgccaggtcagataaggaattcctcctaagatactgcattagagatgacctaaagaatgcaagaacaatatcataaacatatatgtaatcactttaaccaaaaattaattatcaaaattcatcttgacgtattctaatcagaaagtaaactatatctctgacgtatatgttttagtatactaaaaagtcttattttacttaggtttatagataatttataaacaatcatctcttaatctaccgagctatatatatggaaaaaatcatgacagactatcaagtattaaagctaataatactttaaatgcaataatcctataataatgtaagtcaattttgaacttagaagtaaggtaaaaaatagtttataaatactttcccttttaatttatcgatatatttttaagaacaacactgttatttacgggttaataaatatcaaaataaacaatacttaagatgtagtgatcctaataaagagtggatttgtttaaacttaaaagaaacaactttaaaataaagaatttttaatataaatgtttttttaataaaaaaacagataaatttacttcttaaaataagtaaagaaaactatatttttaagcagaaataatttaaacaatcacactaaaaaataaaaaattacttattttattaaaataactgcacatttatttcaataaataaataagtttaaagaaactaaaacaatactaacacacttgaggttatagaatagtgtataatctaataacatgtttttttagtttttttagtttttttatttgagtaaatgctgatgaattatctctgccgactcctttcaaacggtaaattttaaatcccgcatttcaacttgatattcgatgcataaccaaaaacaaagtatattaaactaggaatgacaaagacgatagctgattagttaaaaataaatatatctctgatgactgatatagtaggcgcaaaattatttcaaattttagtttttggaaaggaaaaaaacacataacattaatttaaaaaaaaaaatctcgtttaaaattctccattctatcccaagtgttaattctttcaagcgcatcatcaatgaagacaaatatataactagatgcttattatattttgagccttgatttgttggtagctacattagctgagactgtggccactcatgtcagctcaactattttttgtttgcttttgtttggtaatttcttgtgttttgatgacaaatctgacgcctatcatcgtatttagatacttttatttgacgttatatcacagattaatttgagtcgattccaccgactgaaggaaaaaaattaactatttggaagagggcatcacaaatcaaccaccaaagttgaggaaattgcgcaaaggaaaattgtcaataattttttcaagacttcaaggctaaaatctatgccgttgatcatctttagagactttcttgggggtggtgtttttcttcaacctctttctttaatttttaaatggttaattaaatcgttatttttccatttctaaccgcaaatgctagaggtaccaagttgaattttattttgtctattattttctcaatcgtggtgattatgaataaaacgactattatattttgaagcaaaagaatatcagtaaattacactaaaactactatcattttctttcaaagcattttttttttatcgcaactagttgagaaaatcaagaaacaaaagaagctttaaatagtttagagacaagtcaatttcaagaattgtgctactaacctctacgctttattttatttaaaataaaatacaatatctatatagaagaaagtctcttgacagttgatatctgtactcttttcaaaactacttataaaatattattcctttatatcccaaggtttaagctagacagattgagtaatgcgcaagttttgtaattgttgacctaccaattgattgtgtcacaaattagcgggtgtattgacccgtaaatttgattaactagctatagctaataagtaataacatttctgtagggttgaagcaataaaaagttataaattcaaatcttctaactaacataatattctaattactaataattcgcctatcaaaacatatttctgtaagttgagttgaaaaatggaattagtttaattttattttagttaacctaattataattaaattggattttgtgttaggtcaatgatctaaatccgtttaacttgactcaacaaggtatacatattattacgtaatttaagtaattgttactgttgtttgagacatgtattatactatttggaacatctatttttctgtaaatagtgtttgatttggataattggatttgtatgttaatttagacatgtattggaacctttgataacatgatcaaattctaatcatgtttgaattgaagtagtctatccgtgtatcattctaaactttttacacaatgtatacattttcattttaagcaaggtttgattgtgcctgattattgttttgattgttaaacacctacaacctaacctacctcaaacccaagtcaattcatacctattttctaaataacttaggttaaggcattttgggaagaaaaaaactatttatttagttaaatagttaagcttaaagttattaaaaatatttttaaattaatttcacaaagaccgatttttttaaataaaaaaaatgatataataataaacaacattattgttattattattacatataatatttcaaagttatatacttagtttatttttaaaaaaaaaaacttaaactcatatagcctacatgtaagcagggggtcgtgtctagttatatacatagtttaatatataattatttataggattaattaaatttttagtccttcaaaaatttcatattataattttttgttcctcaaaatatttttgataacttttagtcattcattaatttttcatcatcatttttagttcctctaaaaaaatttgtccatttttaattcattatttatttttattgttcaaaagtagtctcaaatataaaataaacaaagaactaaaaattaacaaaaaatgattaattttgagcaataaaaataaataaaaaactaaaaatagacaaaaaaattagaaggactaaaattgctaataaaaattttgatggactaaaaacttaattatctcttatttataattagtgaatgcatatttttaataagagaaatgctaacactctctagttaatattgatttaaatttgttagaaattacaaaattatgaaggtcttacttattttttgttgatgcactcctacttatttaatgtatctcactcgtaattttatacttttcaattgaccactaaaaaaatgtgttacttgtactcttcttgtaataactggaatgctaattagtatttgtttgataatattaaaacacaaggaaaaaaagaaagagacatcaagtctcaaatcaatttttttcacaaaaaggaaagaaaagtaaatatccttctaaacatcttttattggtctcaaaatgaatttatatagaattctgctttttatagaatttattattgatcattctcgagattttcattacgaatgccaatgttttaaagtgtatcggtataggttgtttgtataaaaggattttattgaaagaaataaactaaatacggtattggtgtaaaaattaattaatattttatgtcgcacctttttaaatatttaacagatagttaatatttaactttccatataattgatgattacaagaataaattaaagcttacaaaatgctatttttagcgagtaaccgcatttatcatacagtcttataatattaaaattgaaaattcccgagttggagcactatatattttcccactcttattcatcaaattacaacttcaattccaaaacaaaaagaaaaagagaaagaaaagaaaaactataaattaacttggtagggagtcaaaggatacaatttgtcctaaaaaacggtgttggactttcctggaatattcaattatatataagaacaatgattaatgcccaaaaggataaatttatcatgtgtccaaatcagattataaaaatgaaaattcacatttctttatttctttgtagtgcaaaaggccaccactactagtcttcactcgtcatctgtcttaataaaataattaagtttccaactgccgcattgtttgtactttgtagtaacatgccctaattaatctaaaagaaagacgagtctagtattggagctttccaagtattctacaaaattggaagtcttatacaggagtacgtacacaaatacaaatttgtatatattgctcgatcttttatattttagaaacattttccataattacgtactatagtttttcttatgataattaattatagtcacagaaaatgtgtatatatatatatatatatcatattttttattttatcattttccgtcaatttacttagggaagatcaggtaggagagggaaagaagaaatcaagagtatggatccatttaaaagcataaaatcaacttagctttttgcttggcctgtttattttctatgattaatttgttatttttctctctcatgagcataaataatgaaattcattttagtttccttatcaacttgatactagtagcattcattttatctttatatcttcttaaatgtggaatttatagcttcttcctcccccattgtgataacatagtcaatgaagaaagaacatgaaatatgaacgtgcaagtacttttcttctttaaaactatatatttatgtacgtatataacgattgcttttcaggtgttctattgacaatgtaaaagtcagctctttagctccttgaggataggttacacagatgtatatcacatgcgaattttgaacaattctcgttattgtttcccattgtagttgtttattacttcaaattacacaattatttaaaaattatagtcgcattcatattatattctttccttttctttcagaaacaagtcatttattaatagctataaatttatttttgatgagttcacttattatccgaaaggtgacttacgaaaagggtcgacgttatttaataaaggctaaaacaatttatcaaagaaaatagaaaatgagagaaaattagtaaattgaacttctttaagtctttgagataaacttctttttaattcgtaagaatatctataaaaaatggaaatattattttccttcacaaatttttaaactaattacgttaataataggcttctattatatctatcgaaggcataaaaatggtaaacggattattacataataaaaaaaaagcagcaaattgacacgtgaaagtcacaagtttgatcttaaaccgacaacttgggttcgattaatatcagcctatgacgaagggaacttgcttgcgaaccaattaattttagtttgaaagaaccaaacgaacacctactgattttgaaatatatattagtcactccttaaattatgaatattaaatgaattagttgggtttattagatttaaaatcaacaaaattttaaagttcaaatcacggataagatagagtcaacaaattcaaacttagagatgccttcgcggatgattggttaggtcatattttcgatgacattgcacaaatgacagagtaatacggtggttaattttatccaaaaaaatgagatgactggatctaacttagtctttggataatgattaaatttctatatcaaaataagtatatgttatatgttacttgagttgagcacccaaaaagaaatgttacttgagtttcaagtagtgaagataaaccagagaatttagctaggtttgattttttttataattaaactgcttttctttgaagtagtattttaatcattctgttcattttataaaatgaaattttttatataattataactataatttaggataaataaattaaaaattctaatttataatattatttaagttctatgcatcgatactgtagaagtttttacagtcgtctcaaccatgaaaagataataaatatgacttaagtaattgttataaaagttaataaaattattataccacggtttttgattaaatgaaattataaaaactattcataatattagtatatgaattattttctctttataatattcaagcatatgtaaaatcttttgtaattcggtaatttgtgttataattttaatccaagatcaaaattatatatggttgatcaaaatttactaactctacaggattattttttttaacaaaattaaaacggcgtacacgtcttctgcctgagggaaattttttaatttccaacgccttttaacctttaagatatgaaatttattagtctttaattgtacaattgtactttcgccccccacgctggaccgtataaagtgccgactattcatacgcagttaataacaaagtaagaattttaacatcttttttttttatatttcttttagctctttataagaacaaaaatatctacattcatgaattaatcttcacccctaaaagagtaaaaccctaaatactcctcctattgtcctgtgcattatattaatgggaggagaaaaagggtaaccaactaggtttgaatataaatagtaaaaggcacacaaggtcaagggttaagcttgtgaagttcgtgtatgagttgtttttgctatagagcctggcacaagagtgtgtcctaaaagatcccacacacatcacgatatagaaagtgaaattttcaaagccgacatggctgaccagaccaccgaccccatcaaactttttaattaattgtaccaaaaacataatgaaataaaattaggaccacactattttatccaaagtcaacattataatatatccttatatatatctatatatataatctcttcatcatattcttgtctaagcagctagcttgcaccacttctctctctctattattctctcttattcaaatgggaaactcattgaagactccatgctttcaactcaacaccaattcatcatcatcatcaaaatccgtgaagctcatattttgggaaggaacatcaagatcccttaaagggaaacacatagctggtgagatcatgtttgagttccctgaaatgatggtgtgccatgcagactctttcttcattggacaaccaattcctgttctctccatagatgataaactcatgcctggccaaacctactttgttctccccattgatctctttgcatgcaacaacctcactgtggcttccatttctgcccttggatcttgccctaacaagtcgcctatcaagtttggtgcatgcccttttcagtacttgaagggttctgatggaagggttgctattaaggtcatgcctgagttcatcactaggctcataagtggtgaagatcacaacaaagagaataatggtgttggaacaacccctggtagcccctctagttttctgtgtagtactcctgagttgcaaaagcactatgaacagcttgtgaagtctaaggatcaggtgtggtctcctaagcttgaaaccatttcggaatacaagattaggttttcgccatgcagattcatagggttagagtggaaagaaaaagaaaagcccgtggaaatattttcttgattaattagaagtactccacacacacataacatcaatttgtacactgatatatacattaattatatttctttctggcctttcaggattaattagccactcgttttctttttcctggttatttataattttgtgaatgatattatggaaattaattgtttcaactttttctgagttgtttaatgcatttcttagttgatttacaaagtgaagcttgcatttataaacttgcaattgttccccaattctaagtcatgtttaattatatatatcttactgactttgtgactactaactatatattcatttgtatttatatcaattgcaagttgaagaaattttgctgcagtggtttaaaaagttagactcgtgatatttacacagctagaaataataaagatcacagacctttctttacacactcatctatttcttcatttctcttgatctctccctctcaattataaggtcattttctctaagttttgtgattcatatatttggcttccgtgtgtaaataactacagaaaaaaatttgctgatcattgataaggagtgagatagagacaaaaaattaattacaaattctattgaaggatagtatatatagatgtggacactttgacatgaaacagctgattaacactcattgtttctgtttatttctctcttttttatcacataatattacttattatgcatatactttcctctttcttttctctttctcaccaagtgtcaaattaaatagacgagaagtgttcatgaatcattttagaattctattagacagtcagttagagtttctaaacataaatattgatgaaaacatagatagagagctacaccaaggtgtcttgagacgaggaactttgaagagtaacttggtgtaaaagacatcatcagttttgcaaagaattgaacccttgaggaaatttaacttctgatcaggaagccctcatatatatatatatacacacacacagtagactctcaaaaattgagcatctggaaagcatatatatagtgtgtcaagagccttgggaaagcctaggactttctcctagcccaagacgtacctaggtttccccttgtcatatataaaacctatgttatgttagaaattaataaatgaaatagatggaaattaaatagatcacagtagttgttattatatatatatatatatatatatatatatatatatattatatttattatatacaaatacattttcataacatttttttctgcgcattttcctttatcaccttacacttctctctttttctttttatcgatcttttttctttattgcaagaatgtgaaataggagtgacaacattcttttaaataggataacatataaataaactaataaaaaaggatatttttccatccattcaatgtataacaggatagtttataaactaataaatttttatttcattccgtctttggtaattttattgcattctacttttatcccgtaatattatgtagctacatattttagatatccaaacgttaacctataaatagatcaaaagataatgcgtcgagtactggtaactaaccttgcgtggaagcaaaaagggtaggaagttatatatgcattgaacaagggagggagatataaagttgattcattaattgggaaaatatgaaggaagaagaaagaaagaggaaagaaatgagagattgtgggtttgaattcttcaactgatatttttgataaaattaataaattaatatttatcaataaaaaaaattaatcaatcagcaaagacacagcgaaggagaaaatcctctttgtcaaattaattagagcatatttagtgatagatcttaaattgagatcttagactattttttggtagattccataatgccaaataggattaaagatctcttaagatctcttccattttttctttaatggtagatctcattttgagatcttaaagagagagaaaaatgaagaaaatttattcttttttgaacattgtgcagatcttaagagatcttccacaagaacccatcctacatggtggagatctcttcaactcctttattgggagatctaatgaagatcagatcttaaactcaagatctttacttaagatcttgcactaaagatgctcttagaggcttaatgcagtacgtgtctacctcagtatagcgggtccaaactccaaagaaaggaaaggctgaaaggaaattatatgcattatattaaccagaagatttttgttttaatgccatttaatttagccattgttacactcttaaataagcttgacccagcatgtactgaaccaaataactcagtgcatcctagtgtggtccttcgagtcttccaagactttaccccatataatgaacattattttcaacaataattatccttaatactgaacatgtaccttggaattaactaaatttagatctagggtatggctatcaaacagggtgaaggaattctcttttgttgtttatttatgagtggtcaatgtatcccatgaaatgtttgaaggggttgtaatatcatagtggatgtatgatgtggcttatataatgaatagaacacttgtctatgttgtttgaagggctgcaagtgctttgggtagaaccttattattggcagggtctctgttgtgtattctgtatatggattgattgctccttgtattttacttttttatcttagttattgatttttattataaatttaatgattaggattaattatttataattatcattggattttaagaaaataaacaataaaaatgaggaataattctaaaaaagatactctttgacaattaagttgatccgtcttcggtataattgatatgtagtcatttgaggttgagaatttagatagtaaaaataaaattaaaagaaagaaaaaaaatgaatgatgcaatgttagaatttggtaagcatgtgaaataaaataaaagttttgcgtatgtcattattcaaatataaaacatatatagccaatgctcatacacaaagataatatgagttgcattatcaattcgtgagcatcttaaagtaaaggaaaaaaaaaaaaactggaccatgatatatataataccgtgctatattttgacttttgataatttacaaaatattgtactttttatatataaaaaaatcgattatttattcctcataacaaaagaattgtagattgaaatttctaatagttctcttgtgagtagattattcaatcaatagtcaaatctgtactatatatcctagtaactaattgtataattcgtacatgtttattgtgtataaagtatatggttttgtatataaactttgaaatattcttaagaaattgagaagagggataaaatgaacaaaaaaaattattagtcggaaaggtcaatgctctttgtataaaagaaaactcaatgctcatcgatgcattatttgaaattcttttcttttttaacaacatctgttgtgtcaatttgggctataataagtggttgaatggcccaatatgtaacatgttaatcgaagtaatccaatttagtcaaagcccagtgcagtgtatttgcccccaaaaaagtagtgcaacaacgaaaatgtctgcaacatttttgggggaatataaagatatgagttcgagcaaccgttaatgaaaaaaatataaatattttttctacaaccaaaatgagacaacttgttttttttatctcttttagttttagagaaataagttttaaatgctcatatgatatgaagtaacaaagataaaaaaataaaaaatcagtttaggattattttagctccaaaaactactttataagtgaatgttcttttttctcatgttgatggctgaatattatgaacataaaacttacaagttgaacatcagtgagtctaagtgatccgatatatttaacaacaaataaacctaacaacatttttaaaatatattctaatatcatatttaattgtagatttgaatctaattcaactgcaaaaataatgcagaataaaataaaggtttttcatttattataaatattatttttattcatatcactagttaatatagaatcttcaataatatttttacaatgtatttttttcaaaccttccaacttaataaatagaaaaatatttgaatgtgtttatgcccatcaagacaaattgaatgtgtgtgtgtgtgtgtgtttttacattaagtgtttattttgtgaaatattaagaaagtttgaaaattgagtatacagtaagaagatatataggtggggatgggtagtgttatattatacactttatagatggtgtcaagtgaattatctgattatctgatatttaaagaataaaattagtataaaaaaaatggtgatgtgaatggctgggaaaagatgaggggtagggttctgaagatttgagcaatgacagtgagattacataaaagagagagtaggtgtgtgtaggggtctgtactgagtctactgaaccaagcaaacaagcccagactttttctctgctattgatatttatgtgagggaccactctacaaactactacactttatagaccatcgtaggtgatttaatgcattgtgcttgtgcacgcattaaccccccttcttcatttcaatgtagcatcatctacatgcaaatttgcaagttctttattgttcgggtacaaatccacgttcctttgtattcttgttggcgaattgatttcgataagttttagaggaaaaggacaatttcttttccatgttattatttgtgcattatctatattttaatcttattggattcttatgtgggggagtgttaaaattatttgtgcattcattaaatgaatcaaagattttagaacaattgattcagcaatcagcacaatatgacatcaattttaggcatgaatagtgtggtaagatgtttcatattagttaggaatacattaatgatagaggatcattgttaaatggctttgtttatctcaattttatagattttataatgtgatatagatttaagcattcttcacaaaaattcaatcaaatatttaacttaattttgtagatcttataatttgtttatctccttttactatcttattttttactttgattaaattaagcttattttaataacttatttttcataagtcacctcaagtattttattttgataagttacttgaagaagattatgaaaaataaactagcttaaaaaaatagcttctttttgttctcaactttatttttactattttatttgaaattttattttatcttttttttttactgtttgaaaatttctcttacctaaattatcattattacatgcacacaacaattaatttgtcaattattattatcacaccgttctttattgttataaattatttgaactatataaattttatgctgattctttttaaaattatataacccaatttaaacaaaatttcaaatatatatggttagtttaaaatagaatatctgatttgtatcatgtttcatggttatgtaagtgagagacgtacatattcaaattattcttgtataaataaaaataaataaatgtttaagaaaattataaaaaaaacactttttattttttgttttaaaataatatcattaataaagtatttaaatgtaaaaaaataattttaaataattcatatgactcatacggattgacaatctgtaaacgtttaacacaaacaaaaataggcgagaagagaagaagctgaatgatatatgttcgtatttaacaaatattatttttgaaaattaactatataatgttgggtgtatgaaaaatatgccttggtgtaggaaacaaaccccataatccaaaggggttcactggctatgattgtctagagacaattgatggagtaacatacaaaactttccagcaagtatctcatgcaataggtctattagaaaattatcatagatgcaattgttgaagcaagtaaactttccttccgaacgtagttgcgaaggtacgttgttactttgttagctatgaatacaatgacagtaccaactacagtttgggatgccacatggaagttattgtcggatgatatagtctacaacagaagaagggatttaaatattcctggtaaatttatttaatatctcctattcatattttttcttcttgcatatatattttacattgtcattttttacaggtctacaaatcgaagataatgttttgagaaatctctgtcttattgaagtggataagttacttcaatcaaatggaagatctctttcaaactattcttccattccattgccagtggcatgatgtgtttgacttccagaataagttgattgttgatgtacacttaactacgatcaagttaagatggaaaggatccaccaggaatcaatgaagtcgttgacaatataactgtatacaatgacattatagaggcaatcatgattggatccggtggatttttttttccttatatggttatggtggcactagaaaaacatttctttggaaaactttatctgcaggatttattgtcttaaatgtggcttcaagtggtattgcctctctgctcttacctcgaggtggaaccgctcattgtacattctccattccattggtcatcaatgaagaatcaacttgcaatattaaactagggagaaatagatcaaaactaatcatatgggatgagacacccatgatgatgaataggttttgctttgaggcttttgacaggacaatgtgagatataatgcatctcaaaataaggataatattgataaaccttttggaggtaaggtaattgtaattgtattaggtggtgattttagataaatattgtttgtcattagaaaatgatcaagacccaagacattgtcgggttgctataaatgcatctaacatttggagaagttgcaaggtattgagactcaactttcctaaaataagatgatgtctactggtatcagcttattctttaaatttcagaggagataattttcattcattttatattttaaatgatgattagtgaaagttaggaataatcttttatcttatgtggacatctatgacctgtatttaactatttgataatatataaataaaaatattcttaacttttgactcactaaaacaattggatgtctttttttattttattctcatttgtatttgtttatgtttatccattatactattttagtttatgttcaaatcattttcatctataagttcgtaaagtatacattttaaactataaaaagttatacatattttaaatttagaatggtttaataggaatgaatttgagtttattataacatgtgcattaaaattgtatttaacatatcacgtactatattcaacaataatggtttaatatattaaataaaattttgctaaaaggtttaaatattagataatttctaatacaaaggttaatataaaatatctcataaaaaagaatcgtaaacgttatcatgcgcttggtaaaagtcactcactctaatatataaaatagtaaaataccgaaattaaaaaaaaaaaagaataaaaaatgtagagtatagggcagtgacagaggaggagaggataggtagtggtagcgctacaagtagaatatgagagtgtatttatgaatggaatttaagaagggagagaggtgagaattttaaggagaatgtaatgtaatgaggtagatgaagaaatgcagaaggtgacaaaaacaaaattaagaagagaaagaaacacgtgttgagatgttgaagtttctcttattgtatataataattgatgtttgatggatgtagctaggtgagtagacaagtggaaatgtaagagagaggcgccgcccgggtgtccctatggcgtgactagtgggacccacttgattaaaatgataaaaaagaaagcgcgtgagttgatgtattgcagggctcgaggcacctcgtgatgtgatatcatatactaaacttcctctctaccttagctgccttccactactcttcacccaaaaacaattatttccacttctccactctccatcattaattcattatgcatctattactactaatatcactctctctctctctaaattattatttttttaaaatttattttaaaatatctttagtataagattttaaactcaagatgtattttttataaatttttcaataaaaaagttaaagaaatttttaatataaataataaatttttataaaagatatcttaagatttatacattactcaaaatataataatttttcttcattttttctctccttaaaattacaaaataagatttattattaaagaagaaaaaaaaagaaatattgaaaaatctttaatcttatctgatacaatagaatctatcaaaaagtaatctaagatcacaatttgacatctaccattaaaaatactcttataaaaactttaacgaattaccaagataattttagcaacatatgttttttttaattattcaaatttattacaaatatcctacttgtgtgtctgcaatgtcaccactttctccctccgtttactttctcttttcctgtctgccttctcgccctcagtaaaggcacccaagtatccattttcctttacgtctccttccgacttccttctctctctctcactctctctctctactctgatttttccttttcttattgaaatttaaaaaaaccagtactatcaaacaaatagtacatctttcaatgtattattattatcatatttttttacatctaagaaagataaataaaattattaaaattaaatttaaaatattattttaagctattctcttatcttataaaaaaataacatttaaaattcaacctaaaagtaacctatactttaaaaataccagataactttaaataaacgaaaatctttaaaacaacaaaaatattaaagttattaaataaaattattgattccttcgccgatgacatggactgaaggaaagtatttctataatgaatttcatttcatttttattgaaaaacatcacaatttatttttatttggtgtatttaagttattttatatacattttctttaactttctataatattaaataaataaaatattttgttcattttattctatattaaacaatctaaaatctgtcttctaaatttttatttatttttactctcatatacgaaaggagattaatggtatgtttggagatgaattctaccatgtaaaaagttaaacaatttttacggtagaaaagtaaattttcagttttaaatttttagtttagatttattgtttttttcttcttttcagaattaaccctccctctctattgcaaatttgcgtcccttttctcaatcctaacccacctctatcaaacctgcaccaccatcacacctccgtcaatcctttgcaaccaccacacctccgtcaatcttgcgccatcactacacctccctcaatcctttgtagccgttatacatctgtcaaataagcaaaaatatatctaatgactgaaatttttttcataccataaataaaatgtttaacttgttgcacggtaaaattcgtcatgttcgaaatggtagaaaatggatgtatctatagtagataaatggaaatagaaaatttatctttacttatatggtttggtgcactttaaaagtgaaagaaaaataaatttgtgacactcatatctaaatgcaatatcctttcaatttgaaaaaaaaaagttgaaaataaggtgattaataattaaagactaaattattcttatttttacacacttaactataacatttttatttaaaataaagggtttatatcatttcattaataactaaaacactcatacattcatgattcatgaatgacatgaaagaaaaataaaatttaatggacactccaaacgtttatgtaacatctagaattagaaagagagtaataaatatagataaataaatgttggttataatttttaacatactcttttgaatatctttgttattgattgaaatttataataaaactcaatagatccaaatcttatttattgattttctttcttgattttataatttttaatacattttaactaataagaagaaatgtgtatggaggagtgtttgaaagagtgtgtcttattaccactcctcatatagatatgataaaatcttgatttgataaaaagaaaaatagaaaaaatgagaagtgttactgttataggatatttaaaataataaaaatatttatttatcattaatttaaaaagaaattcggactataatacaatttaaacactcttaataaattataagtgacttgatttgtttgtatgtgaattaagtatttatttcttaactaaacatggcttttcatttgcgccactataacagaccttgaattctctaggcgaaaagcgtttttctaggttttgtcgattaatttacactgaaatagatgtgagagattgattgggatttcatattgtaaactgaaaaagcatcaactatcatacttttgaaacgcgatctttcaacatacctcctattggaccctaggtttaggttagagggccacaaaataaccctgacattagaggcacgcgcactttaatgaaatgccgatgttacccacaaagtgtcaataaaaatattactctagtccaatatcctttttgttatctgtctagttcttaaaatttatttatttatttagtagtttttaattttatatggtttttctatttttatttctatctactttttgaatattttactttctataaatataaaaatataatagtaataataaattgaaattaattttaatataaataaacacattattaaatttttgaataagtaggcaaaaaaaaaaggagtatataaaataagaatttttcatgagtgtcttaaaacaactaaattaaaaaacaataaataatgaattaggtttaaaaatgaatgtagatctacattgaaaatcacaatgaaaatatgtaattaacatttatttgtaaaagttccgcacttttaattccttgaacaatgcattagaggcatttgccagtgttctcatcacataatagttatttaattgtgattctaataaaaaggcaatgagtttgtttcaggcaagccaatccaattttctaagtgtgattaaaaaattgtatttctaataaataccatctaatatttaagaatatagaattatatgtaattttgttactcctatttttaaatatatgtaatattgatttcattatttttaaatataaatatttaatccttttattttttaaatttcataatttttatttctttattttaaaataaaatatttaatcatccagtttaataaaatttataattttagtttttttttatcaaattcaaaaaaatgttgattgataaaaattaacttcatatgatctaaatttagtgatctgagataattttttaatctatgtcatgattaatatatgtgttaatttcttaaccatcaatacttttactttgaggaaaaactcaaaattacaaaaatataaaactatcttgatgtgaaaagacagtgatcccagcttagatcaggcttgcgaaataaaccgggccataattttctaatgagtccacgggccgaggcccatttgtctcttgctttctttattagttatctttccattgtttttttttttttttgtgagccgtttaattccagatttaattaatattgtacaaacttagattaatataaaaaaatcaataggtcgaaatttatattgcaaatataaaatcagttttagttttgagttttgagttattctttatttttaaattttaaaaagatgttacaatttaaaaataaataaaatgattgaactattttgtcttatgtcgctctaagatgaaataatgttgatgataaaggtaatggagtgggagtgacaataataatggagtaacaataatggtggtggaatggtaacgatgataataataattgcgaaataatgatgattatgttttaaaagtcgttgcaaaacttctcacaaaagatgttagtataatgtttgtaaaaaaaatgcagctacaaataactttttttttcttgtagtgcacgaaagaataaattacattaattatcctaaagttttatgaacctacacaaatatttcctttattttactcctacactaatccttcttaaattttgaaaaatatacactgatcatgctcatttatatattacactaattcatcttaattgtttataaaatattacaccagagtagcttgtgtaacacaagattattgtaaaggttaaaaaaagtagagtattatttatgtaattttacaaaactttaaagacaattaattaaatttattctttataaaatatgttgatatagtgagaataagtcaggatttattttactatatatatatttaataaagttaataaagaaattaatgactttgggggagagaaaatgacaagtccatgtactttttagggtttttctgtaccaagttgattagttggcaagctaggaaagctacatgaatgtacaatgtgtagccttagtcaaactagggaggcttttgtatagcgaacctggcagtcaaaattttgtacacagttgagtttgcaggaggaagaaagaaccatagctagctaggtatatatatgaggccttgtttgccaatctgataattaagcagtgacagaagaggaagaagtttccttagcatggattcctataaagtctgtgccagccacatgttcatctttaagcaaaaatatttaaaaactaattgaaaaagctatgcatatgatatgatcttcccgaaaatgcatggtagctaatgctaaatcatctagaccgcatgtattcggggatcgaaacacacacaaaaaactggcaaaagcattgtcctacttatatcttcaaaatcagagatttaattaccataaattatcttcaaaatcagaagaacatataagaaattaatgaaattatatatgctttctcaataatattaggtttagccgttaatgttatgatactgttttgaagcgccattaaaaattcgggttggaaaactacaaaacttatgattttctaataaaagtcatcgaaatttgaattggaataataaattaataatatttggatacttttcattgcagtatttcaaaaatacatttttttacattatttttttcaaagaagaaaatggtcagtgaaatactgcatataaaattaggagtatgtttcaaacagtcataatcataaatttataagaataataatttattattttacgcatattttataaggtttttacataaatattttttatcacattaggttatttacttttcaattctctctccctttgttctatatttttcttttaattataaaaagtataaaaatattgctgaataaaattcatcatttttaatgatattcataaatgaaaaactatacgaagatagatatacagacaaaataattggcgattacattattgtagtattgaaggggtcgtatattcctgccattggctcaacaatgatgggcattttggcaggctgtcttgcatgggtaaaggaaattaaagaaaggaaggaatttatgttagaacactgagcccacactctgaggttgctctgagcccctcagacagcaaaatctccaacaaaattcattttagaatgttaggacaaaaacccagattatgcattttttttttggaataattaccaatatacctacatagctataaaaataatgattattgaaattttagaattcaaggagagaattagcttcggcataaaaagaaataacgactatataaagaaatagaaaggcatttaaatgcttatgcttatgcctgttaggctttcttagacagtaaaggatctaagtacatgtaattaatttatattgcgagttgtcaaaaccaccacaatagtaagttgatttgaaaatgataaagaaaacaaagtactatagtttattgaaatatgttacttttgatctctcagtaacaaaaatttcttatataaacaaattataattacttatattttattcaatgatattatctttaaaatattttttatttattaaagctaaatatttttaatgctgaatattaagtttcaataaataataattttaaaaaagtgtatattttttaattagaaatcacataatttaatgaagttaattaatttctttaataaatatgaaatatatatattttacttataattaagacaagaagtagtatatatttatgatatgtacttaaaaaaaagtaccgtcacttacacttgttatgtttatgatatgagtcacatgttatttttcatcaaacaatgagttgtgttcgtaattttgacccaccagtcaccacaatttgtccttccaggattttaggtcaattagactcacgaagtaaggagtatttgatgccaatcacgccctgcaagaaagtgcattttaaatgttttatactagtactagtacatatatgataaatgaaagagaaatgataatgaagattatattaaatggttaaaaacaatttcaatacaaacaagcataataatagttcaataatccatggaatggtgatggtggatggggaagaattgatcacaaatgccgagaaggtggaggatgagagatattggttcctggatttgagtatttctaatacttttgctcctttcattcattcataatttctggcacactgtttaggggtcaacggtggataaggattggacggtgatgcgacttttgtagacatatttggactttacgtttgatgtgactcagaagtcaccaccatgcttcacttcgctagctgtcttccttatacaagttgcccccacttgtgttaccctattctctcgactctcatggtttccttttaaatcaaccattgcaaatgttccattgtccttgtagtaactacgaacttgtaagttgtaacccacctcgtttaaactcttcctgtatcgattcttatcaacacattttttttttcctttcttgaaaagcaaaatacgatgtattttgacagatagaagtcataaaattaatccccaaaacacatttaaattagaagtgagtttttcctctcttaatcaaaatttttcatatttacaatctgaaaatctaattactcttaacatgcttaaaaaattgaattatttattaattatactaaattttattggtcttttaaatacactgttatttataatataaagatttaaatatgtttttgatttttataagttaattttatttttttaattttgatacttgtaaaaaaatattatttatttttatttcttgtaaatttgagtttttttttttaattttggtctctatgaggtattttgatatttttaattttgataaatttatctctttcaattttttgtctatgtaaacgcaaaaactataaatgaaaaaaaaattaaatcttaaagagactaaaattaacaaagcacaaattcacaatgaatgataatttttttttacaaaaatactaacttataaatatgaaaaacatatttaagtaaaaaaattatcataagactctttttactgcaatttactataatgattataccctacatttaaaactatttttatgatatacccttcattaaaatacgaagaaatgaaaaataattaaatcgttactgtttttttaattatacaagtaaatggataatgtagtccttaattgtgatttgttgcaactttagtttttagaattaacaaaacttcgaaaaatctttatattataaatttgtactcattttagtccaaaattacgtacatgcatttaaatattaacatatacttaatgatcaaaatgatagaaatgattaaattttggaatttagttgaaataaattacaatttaagttttttttaaaaaaaaaatctaaagatcaaagtcacagcgaatcacaattccataaactaaattgttcatttactctaataatatcctaaaaaagaaagagaaaaaaaacaataaatggaaaaacaagctaatcatatggtagttgaaaaataaataataaatttaaacaatattttgatacaaacaaaatacttttttgtatttcataattctaatattataacctgctctggccggacctgacttagtccaagtctagtaagactcgatatactccatctagtcgaaaacaataataatcttcgtaagcatatgatggagcaacttacatgatgtaaggttaaaaacacattctaattaaaatattttaaattactctataaatacattttaaggaagtaaaagatttttgttattcagacgcataaaaatagattctcttacaattgttaaatatgttttcatatgatttttaagattttttttttttttttaacttcttaaccacactctagtaacattaattggttggcaacccttaactaaattatttatttattaataaaaaaaagccttgaaaacacaattattaacattctcaatttttaatcaacatattagtatgtttggttcaagtaaaaaaaaaacagtagtattaagaattgtacgaagtaacacattataggtaaagttatggaatacatgaaaatataggtaggattgacttgatggttaaaagtagaaaaaaaaaatcatagatttaaatccttcttaataacaaaaattaataaattaatatttttaatattttttttttgtaatttacacgcagacagaacattagaagatctttgctaacatataaaatattgggtctatgagatttttattacttatatgcgtttaacatgtctcttttctacttgacgcgaaatctccacactcatgtttaacaatctaacaggaaaggctcctgtttgtccccgtcaatagctgaaatggctattgaaactaatactaaaaagaaaaattttatagcaactatagcaacatttattagatttctaacatttaaaaatgacttaacgaaaaatcctcttctttcagtatttttggaatggattatttaatatggacaggagattctctccaacacttcagttacttatataagtatttgtcgcctttagtttgacgtcgagtcaaataattgaaagcaagcatacactttatctcgcaatgcgtcaaatctaacacgaaattatatatagtttaaatccacatattcagaattagatcaaatgtttgatttagaacccttttcccatgtgaattaagcaggaaaaaatgatagtagtattaaaaaaaatcaaagttatatagaacatagagaatgtgagagttcatagggaactcttaactagttgtggtttgcattagcttgaaaactcctctagcgctcaacattgtaatttgtttttgacttacaacgtgtttggttctgcatcagcgaccctttgacacacactcgtaactccaaagctaccaagacctacttcctcatatttgaaagatgagccttgaagagagattatagaatccgtgttggttagttattttcaaacatgcacttaacacttttaatacttggccttgggataatgtgagaaactcttcatcaaaatagagtcggataatgtgagaaacacttaatattgaacctattctttaaaacacttttttgtatattatagtgatcgatgatattctgttttttcttctcttacactatttagattctgtggaacgaaatcttctttgtccttccaaataggtcaagaataaaaaatgaagaaacgaaattaacaaactgaatgaatttattagtgtagattacattccacttaagctttagccacatgacagtgtgtacctatttttagatatagcagttggtcattaactcatgccctataatttatttttttggcagcctttggtttgcgtttggggtctaataatgatatacttactcggtttgctgtgctactaccctgtgtggaaccatgcagcaactcataaaacaaagctgttggaaaggaatctgagttgcccaaggaaaattctatacagttccacgtattttattttattttttttaaaaaaaatacaccgagtggtataagaaatattattttattttactgcagatagaattagatcgattttgaaaaataaaattatttgacttaatctctttaattttcatatataaatcattcagttttaaatctgatcaatttaaaaccatttgaattagattgattttttactttaatcttattttactttttgggagaaaagattaaataaatgataaaaatatataataaaggataacttaaaatattcaatatctcctttataagtcaataataactaatggtagtataactctttaaatatgtagtattaaaagtaaacttaataattatacatatgtacgtaccttcagtcaaatagttaaaaatatttatctttaattaaaatgtttttataaataaatatgttataaaataattttataattataaaataaaaaatatataaacgtaaatggtataataaatttataaataaaaacgtatatacgtatatgcatatataagtttaatttggattgggtttgatatcttattttcagaagaaaaaaatattatgatttattatacattcaaggatatttattgtttgagtaattttcatatgttattaacatgatattttactcttaattaattaaaaatatattatatataactttttaagtaattattataaaaactaataatattatcatttatagtctaaataaattgttattattttatgctacaatttcatattactatatatatatatatatatcttcatttgtatgttcacttttttttaataattatcaccaatttatgcttttagattaattcctttaatgaaggtatggacaactttaaaggtactctctctttgatacatttagatccatatccgttatataacgcttatataatattttcgaaaataactattttttaattattttaagtatctgtgtttgtgttaacatttacttttcatattaaaaatataatactggtatatgttatacaactaattttaattactataaaatatttctattatattaattagtataaaaagaaaaattcatagccaattaatgttaaattttgaggaaaacaaaaactaaaatatagtttataatatggaaatcattaaatataaaaaaagtatgttcaacacaacaaagtcgacctcacatgccaaaagtaaagtgaaggtacaataagttttttcttcttcttttttaatgaacacggtacaataatttacatccatacattataaacatgtagctttactgctatttaatgcttaattttatatttttgaagaacctttaattattgatattgattttgaatttttttcctgtaagttatgttttgtttttttacataaaacttttcattgatattcttaatttaattcttaaatatcaatttcagttacctgtatgatttttttttatattatatatactttttctaacactatgaccgaagttctgaaacaattatactttgttcctaatgattacgtgtagggttaggtttcatcaaatcggcctgctaatcaacccaattaaaataggttagattgagttaaatttctgtaaatttttttatcaaattcaaaccaaactaacctaatagtgagttgggtctacaggtattggaaattaaaaattatttcataatattttaaaaatatttttttatcattttcaaatgacattttgatataattttttattagttacattgtactatatgcattttgattttttctttctttcatacagtttcactataaacacaaaaaatcatatgtaacaatgaagatgtgtgcacgttttgatttgttctaaaattaagaatcctagataggataagaaaatctagtatacttgcttgtataattgtgtttggtgagtgtgtgtgcgtgtttttctctattttttattttttttttgaaaatatccaaaataataaattaaaataaaaaagtatgttacattaatagaattgttgggttaatggattcaacaccaaaacccgacatccaacaaagaacttacgttttttatttttatttttcactgatataaacaatttgaaagagtattgaaggagtagagttcgaataaaatactcaattaatttatatccttattatggtattaaaattctcattgccttttgcagcaaaatattaatttagatcgtactatgaaaacaaaagcatagttctagaagaaacttacgtgtttgttgaaaccataaagagcccatagagacaattatcagcatatgcatggagaggaaaacaacttgttttggtggtagtgcttttgcctttttaattttgcttgggtaggagttaagtgggtgatcatgcatgtatgtacccaaaagaatttcggtcggtggaaattaaagctaagctactcaagtaatacacttacgattataatatggtgcacttttgccctttccgattaaacggaaaacaaaacgcttctccatttgattatgtagcatgatgaaatccatgccactagttaaataaatagtcagcgattgcatccatgcatggttgtcaaaatatatatatttttagagcatcaaattataatgtatttaattcgtaccgagcctacaaaagaaaagaaaaaactgtgggattaaaatgcacgaggaatcatgccattaatataaaatagtactatatagttatcatataccatatagttttatatggtttgcactttgtagtaagtattaccaataatacttttttttttctagactagaaatgttttgattttcatgtgaaaagcaatgagatgcatgtgtgataatctgatgggtaattggaagaaccgatgagatgagaaagtgagaaagaagcagagcccagagaggacagtaacgtacaaacaaaacgatagacagcactaatgaatgtgcgtttgtttatgaagaaaagatgctgcttttgtgcgtcagtgcaataatctttgcaaagaagggcaacataaatattactaattaaagactttttaggccaaacaacaacaagctggctttaagcacagttagacaatggaaaacacggtgtgagaagtgattgcttttcaagtgcatcattaacacactttgtataagagagagagttttagaatgctttgaaaaaagagggtactttcacacacacgcttacaattcacaatatcaagatgtgtgagagagaggaatgaattgaatgaaccttgagagaagtgtgtgatgtgaagactgaagaggaaattaaactcgtggcccccaagggccaaacaaagagagaagaaggtgcccaaagaggacatgaagaggcattgcatttataacttttgctttctcttctttcacttttttgggtgatctatgttatttttcagcttaaaaaactaatgatttatctctttttttattaataaatattaattattaattttattaaccgatgatatcgaacatcttttctttcttttctttctttctttccttaatccttagaaatcttatatctccaataattaatcccttatagtgaaacttattaaacaaattacaattttttttctatatacataaatttgaaaactgaactctaaatacttgtttaaatacttgattatttatcaattatataacacaaaattgattttcattctttcacgtgtcttatctaacaatgattctattgcttttcatctttgggccgctcttaatcatcttctatttagccaaaagtaacacagctaattaatcgacccatgaagtgaccttaagacacgagtttatcacaaaaggcaaacaagggaaggctttttcatgttccaatttttatttttggtttcgtgttcctttgttgtttttctcatgttaaagtttatggctaatttactcacagccaccatgcatcttacacgcgccaaaacgctcagaactttttcactgggccggacaagtaattaacttcaagttttattttttttataaaagtgttgtattcatactattcatagacatattttacgaataaagtttttatcacgacacttttataaactatacagttatattttaattccatttccttacataaatatataatgatattgtaacaagaaaaaaaatattaaatttatttagaaatttaatagtttttatttgaataattcctaagtgtatttatttaattaaattgacttgatcattttgaaaaaaaatattaatagtaaatttatacatgttacatcaacatattcgcaacattaaataaaatataatgactatatatatatatatatatatatattatctacataacatcaagtttataataagttcacaatactgaatggaaataaaataacttgaccaaaaaaattctgctatgactattttctaacataatattgtcacttatatatctcattcagagtatacttttatagcaacaaatctttcacctgctaagtgcatgtttgacaattaattggtggtgcaccaaacagagattggccaacacatcttctttcttacaaattggatctttattacaacacggcgttgcaacaaattaaacaaatggaaaagcaaacatccctaattgtttatttttttaatttcaggcttacattgtttaattgtggctgcattattgatcatgagctctatatataaagattcgtgacagtgtttagtttcacattttagacatgaattgtcgtgtttggggtgaggttttaagaaactaataactataatttttacgttcaaattaacaccacaaaatcaacccatctggttgaattgccagcgctgactctcgttaattcatcttctccacgtgcagtcacaggccataccatctaatcccaaggcacccgccaacaaactgtgccattttgaacaaatttactgtcactggatctgctgctctattgtcctcgttttatgctgcggattcgctgatgatagagaatcttgtttctttgtcttcatatctttcactttcatcacttacctacatgaatgtacatatgatttttttttttttttttttatttattgaggggtgccatatatagtagcagaaaacacaatttctggtgttagcaatttgccttgttcacgtgagtatcctaagttgggtaaatgttggtatacgatcgatgcaaaaatttgacatgagtaaactgtatttttttttaaaataataataatagcaaaaacttatatacaaatcctagtaatatagcttttctaacacaccttgattaaaatttgttagaaaccaatacaaaatttgttagaaaccaatacaatgtgtgagtttacatcatatttgatgaattttactcataattttataattcttaataaattttaagtaaataaaaaatatttttctttggtatttcaagttacaaaaattatgtgaagtaaaaattaagatagtgaacgctgtgtaacattcagatgcaaagtagcggaagatttcaggtgcttaactttttttgtttgtgtatagtccttcttgtataagaaactatcagaaaactacataaaatgtaaagcagcaagcacattcatttcaccgaaaaatcccatatacaaagggaaaaaggagaagcttttgtgtccaatacgtgcgttggacgattcttagcagtacccaatatgtacatgtgaatggcattaatatatatatatatagttgaggtacaaagggtgctatgaaccacaagaaaagtctgtttttgaataggctttaaaactagttaatatggatcggattctttgcttgattagcagcacaacgtacgctcatgttttattttttgtggtttaataaaattccagaagaaaaataatagtaaaaacataaagctagctaattaacgataagaacctaatacatattgcataaaatagacccaagatatgctgtaaaacacaggaatataacttaattattcttcaacattaactaaaactatatattttgaatgaggttatattaattgaactattaattattttaaacaaatgtacatttattaattatctaaaatatgtattaaaaaatagaaaatatcacatgcattggccgtactagaatgaaccttttcatctcagatcaataagagcttatgcataattatcttggtgactctttcaataattaattcataagttattcttaatataatttatgatcgattgataatataaaattattctatataattagtatataaattttaatcattataaaaaaattgactgtaaaataagttaatgctcatctaaccacaaactcatataaaattcggttggtttgatttataaaggccgttctgtctaactattgtatggtccagtctgaatttacatctgatgatcagtttgtgtgtttcgtattatttcatgaatctgactgtgttaagaaaaaatcataacattgttttgtcctctcaagtctcatctgaattgcatcgtaactcatgagatattctttttgtctacgtgggatgaaactttttcaaatttgaaagatgcattttatttcaagcagaggaattttcactgctatagttttgtacttcatctttccattttagtaaatataaataaaaatattaattttatgtcttctatcaaatgtctgtaaaaagacaactttggaactgcttatgtttaacaaaaaaaaaccaaactagcaaaattatttagcaaaagcttcccaagctgtctgtggcaaaaactgtcatataccaccacaaatgtaatgactttacttgaagtaaccgaagcactccatttcctcccatgcaagaagtattttgttttatagataaatcattaaaagctaatcttgcataaaaaaagctctataacactttgagaaaagtataaaaggatgaattgttactcaatttttttatactatcaaatagaatactttttttagtttttataaaagttttttttagtttttattcatttaaaaaacacactcatttttaagtgtttcattgggattgtgttttcccttcctaaaaccagtagtaaattatttaaaacaaaaataagttatatatagtaagtctcacttgtgaaaaaatatattattatatattagaagaaataaattttacattaaagatgtatgatgataactcgaaaaatatataaaaaaagataaccaaaacaatctaccctaacaaaatagcttctatacgtatattaacttggattactgaaggaagataaaaatacttttttttagggcagaaaataaaagtacttaagaaactcttttagtttttcccctgaaatgtattttagaaagttacaaatggtatacatgtactatatcgtgtcatcttattatttcttgatataaaaaaaaatacaactaagggtattaattaaaaatttaaaatataaatatttttattaaaagacaaaaaattatattatttatattttttttacgttcttttgtaatttatataatatacattttttagtttcttgattaatatcttaagaatactaattaataagatccttgatttgtattaatcaatttacccgttatactcaagctgacgatatatacacaaactctaaaaaaaaaaaatggagtgaaaaccttaatttttttgtcatttcagtatgaagagaagcataaagcttgagttcagattcaatacagtgagagcttcaatacaagcttaataagtgccaaagtctacaaaagctattgtctagttacagtaatgtgaggtacacaacaaccaacaccagcaagaccatcagtattttgttacgaattcaaaacgtcaagttatttgaaaactatgactatttttatttagttacacattttatgtagttaattgatacaggtaaagaagtattaataaatggctggacacagacaaaagcgccggtgtgtattttttggaaatcttattgaaatatatatacataaactcagcaccctaatcttcaaccattttttgacagtcataaaaaacaacaactaaatcaataagcaaaagcttaagttcgattaactgtcatctgagcatatgcacataaattgcaaaaaaaaaaaaaaaaaaaaatcatagaaaaactctttgtgtgtaatttaaagagagactcactcaataaattgatatctgacaaagacgatctaaagaaaaagaattcatagatatggggttggaaggactctcttagtaaaaaaggaaaaagatatggatgacaccttagattatagactacagtatatagctgagtgctactcaacaacatggtttaattttattctcaaaaataaacaacgtcccaaattacatgtgtgccacagatagaacgtagttgctgcacgcgccgttccgagtgaagtgggattgagacgtaagtggtgtttgtgtaggtattctggggtgagaaaatgcactacgcgcggggagtgatactcacgcgccgagcccacaagtaataagtggcgtcatgtgagtttcatagagggtccataaaattacaaaaactagagaacaaaagtctttatactctctcttccccttcttcttctctctttctactactactacttattatcagagcctgataattggagagagagagagagagaagagtctgtgtgtgggaattggaaaagaaagaaaggttagggaagagaagagaagaagaacccatttcagttttcacttttcataggaagccaagaaaaagaaaggacttttgttttgagagataaatgttggaagaaaaagaagcttagctaggtttgcgaaggaaggagatgatgatgatatgaagagagagaagaaaggtcggcaacaataacaaagcaaagcagagagaaagaaaaaaaaaatatagatagagagagatagagagaaagagagagacacagtaagtaagaagtcgttattgcattttctcattcactgctcactctgcactcttctgctggctggacccttcagaaactgatctttctttctctctctttcttactcgaaccaaaactttttcttcctgtggaaaaaagccaaagtgacagtagtagtagtagccacaatagcagcagcagcagaaacagaagaagaagcagagaagttgttcgttttcccttccttttcatagagagagaaaaatctaagtccactccattcaactcccccaccccaccccacctcaccctaacaatacaacaagatctcatctcatcttaaacactaaactccatcaaaagagaaaacttctctcttttcttttcctccaccaacaaattctttccctgccacaagaccccaccccaagaagaataacacccacattagatacaccctcatacaaaataatatatatacaccaccacttacacaatagaagatctatgcttctgtagttctatagttctacacttagttctgtctttccacctactctacaccaccacttagacaatagaagatctatgcttctgtagttctatagttctacacttagttctgtctttccacctactatacaccccactttttttttttttttttttaacagaagaagtaaactatatattattacttatattgtctcttgatttgagaagtaatcaaggattttcagttgtggctactacaaggaggttaccttcagattctggtgcctttgcggactgggcagcgacagcttcctccggtgctggtggtggtgccggccgcgctgtccccgtcgacgacctctccctcggcttcaatgcgggtcctactgccgccgccgctaccggacccaccgccggaatgtggtccaccgcagctaggtcaatcaattaccccgaaatggggatgttcgtggtggcgccagcttcttccttccaccaccaccaccaaccgccgcaacacgatcccgccgtcatggcggattccctcaaccccgccactgcactcggcgtcggtgtcatccctctcctcgctgccacgccgtgcctggaatccgacaacaacaacatcctcggaaataggacacgtggcggcgagggaattcagctatggcaagaccaacaacaacaccatcaaagccactacatgaagaagcagctgcagcagggtcttctcgaccataatagtaacaccagttcggggaatttggttcagaacagtggcgaggtaactgcttctggaactagtagcggcggaacaacgtgccaagattgtggaaatcaggcaaagaaagattgtaccaatagaaggtgcagaacctgttgcaaaagccgaggctttgattgccctacccacgttaagagcacttgggtccccgccgcacgccggagagagcgtcagctaatgacgtcggccaccgcggctgtcgccggctccagtggctccacttccggcactaaaaaacctaggctcattgcttcacaaaccacaacaacctcccacacttccacttccaacaccacccctcctagaagcttcgacactagctctagccatcaaggtttgtgctttcttttcataataatgaaatgattttattttgcatgaatacacatgtattaacataaactcatgcattagcgtcaagggggtctgccgttgagcagggttcgtgatgcatgagttattgtaaacctctgagactgtcttcgattctctcgggaaaaaaaacctcatgcattagcttcttttgggttggtgcataggcatgggtttgagagttgaaagggtttttaaggttgttaattgtgatgtgtattgttgaattgtgtgcatcagatgcggggttcaaagagtcattacctgggcaagtacgtgcaccagcggttttcaagtgtgtaagagtgacggcagtggaggatgggcaagatgagtatgcatatcaagctgtggtgaagattggtggccacgtgttcaaagggtttctctatgatcaaggggtggagaatagggatgtgtatcctaacctatctgagttgcatttgggtggtggaagtggtggtgcaggaagaaatggggtttcatcttcatctccaatgatggatcctaatgatgtttatgcagcttctggtggagggttactagggggttcttcagcatatggtaatccaatgaattgatctgaaagtgtctgaaaaactgtctttccgagtgcaagatattagtagatgggcttggagaggctgatgatattttaattttcttctaggctttgtacctttattgcatatgtcactgtttttctgtctgccatttttcaacttgattttagttctataattctttctctcgcccaatctggcccttgtcattgcatgagatcatcagttagtgacaaggaaacctcactatcttctaactgttaaaagaaattgtttcttatgtactaaatttaactcaaactggaaagcaaaggtgattaaaacttattttacttggttcactattttaaattttatttttagttaacattattgattgcaagcttgcaacaattatatcaacttttcttttgaagcaaatgccttttgttttccattttactccccctttattttcattgttttatacttaaatttgccaaaggtgaaatctacagtattatacccacaatcaattgctacagtataaagcgtatgataaagatgagtttatatgtgttaataacttctgataattgttattgatgtgcgttcacccctttgcgttccagatgtatttttcagcattatttactcgttattttggagtgcttccattttctgaatagacataaacataatacattatttaattccttagttctatatgctaatattaaattgtcactttgtgatggctcagtttgttttaaatattgtggaataaataaatgttgagtttacaagtagctgctgtgttagacttgagcattagaagttgttgtaacgtcaccgtcattgtatgtctgtccttttcatcctagtttattggtcatctctgatgcgtgagaaacctgcaaagtttctgcattcatgaagacttgatgtactccaatttccttttgttctttgtttgggatttgtagttcaggcaataacaattaccgaacctttcatcttctaacaataacagtcggttttccagtgtgtctagacaaaattaaagctgtttaattcttctgttgctcaattttggtgcactatggtgctaaacttcaactaccaatatgtgcagcttgagttggtgtcacatttatttcatttgcaatctagacccattttagatttaaaaagccattcctttctcttctaaaagattttaatagtagtatttgtaatattattctatagcatgccgatatcctagaacttgccttgtatgttattttttcttatcaggataagttgatgtcgaggttgcattctcagcttttatatactgtattgccggagaagctgcagatgtgtcacttatttttttggctagattcttagatacggtttccgaccattgataaacaaatgaatgattgtctctattcattgcatatttagattatcttttcctgcacatgctgcccccttttagttgtctgaatatattttatatttaggacgattatgtcatgtggattgcaatacagtttttatatatatcttgtttgtcttgtgtttgctatgatgctacatatttcactcatgaaatatccatgaagcataggattgcttgtgttgtggcatggtatgatagtatattaacaaactactatggacaatgcattcacatttttgtaccagtggttttttttttttttttttggtggtgatatttcttgaatcataatgctgatctgtctaactcttcctatcatgtcaataaaaaagcattcatttactttacttttccactgatgtagaatcaattaccctgtctttagttaatttcatttaagggttgtgtttggaacaatttgtttgtgccctagagcaggcatttagaatgttgatacaccagtgggtagttttagcttgtcttgtgctggcaaattgtttttcctttctgggatttgggagcatatgtaaaaatatgttagcactatcatttgttttcttctccattgtgaatgattgggtaactagtttttctttctttgcgtggggggcctccctttatctttgggtattttttggtagaaactattatttgatacagcttcacatggttggtgtaattatgttggaacattaaggtacatgtctgtgctggtgaggacactactcttgaattgctcacatttaagtacactagagttttatgcgtctgcttttagtcatgttctgcgaacaattttgttgtgcccccttttgctttgttgctgcctgtgatccattatcatgtcttaattttgtcatgttctgagacttttatttccatttaaaaaatttaagcacatggttatgcattttgtcttgaattttcttcactctctgttacacatgttgatatgcatttttgatactgggttttcatgttttgccctatttgtgcttttttgtcagtttaatttcttgacatgctctttgtagttccgaaattttgttgctttagttttgtattgtgatttcataatgtttgtggctgtgaattatttctccatcaaattatagctctgccatagtctggcttaagctcgtattatttgttccaaaggtctagtggtttctacgaaaatggttgtttatataggagttcgtgtaaagtcatttttgttacttggttttctccctttccctgggtttttagtatgtgattatttaacagctacaatcatattcttcaccgtgtattttttaaggaaacgtgtcattattctggctagtgtacgtgttgtatttttttagtccatatataagggtggtaatgaagtgattggaatgtgtggaatttttcttttgtgctcatataataacggattgttgagtgcttagttgattacttgatcccactatctaggtttacaatatttattatttgagaatcgtttatttcgtcgtgttatttttactttttgtgccgtatacgttcaggatgcttgtgtccgtttaattattccagggcacactcttattttgaattgaacttcatgaatttcttgggtgattgtatggaacagttcctttatgaatttatctagaatggcagaatcgaccgtgtttgaccaaatttgtcatatatttgtttaggattaatgcatatatttatattatttaccctaaaaaatgcatgtttaaattttttttgcaataattttcggagatgcagtctgttacacattctaaaatttttaagtttttattaaattaaaattttggtctccttagttttctaattttaaattcatgatttttatcttcttaatttttaattttttaattgttatatttgattaatttttaattgtaacatttggatttggttgtcctttataaattgtagattttggcacacctatagattattaactaattaatcaatgattgtgattaattgagttgttaaattaattataaattaaaaattataataaaagattattaatcctattttttttttatagaagtagttgtcaactgctaatctttattaggaagagttaagattgaaatgcagtagtcatgtaagattttttggaatgtcagatttttcttttaaatgatcacttcacataatttttgacaattaatacaagatcatatagaataaatttagttttattctagtgtgaaaaaaccgtttttactagatacgctaagcctctgaaacaaaaaactcccatgggtgtggatgtggcagcttgtaaattgtaggcgaaatggttctgtatgctctgcaaattaactgtatcctgtcttatgcgtttctgcgtagcttttgattttgtgcagtaggttaaggtcaggtgtctgattttgtttggattggatgataaggtaaaagaagtagcatattttatatgaaaatagattgattagaaatggttaaatattttatgaagttttgtttaacttatttggtctttacacatatataacaataatgatttgtggataccttaatcatgtgttgacactagtgagaaaaagaaataatatgaaaaaatatagttataataaataatagtataatgtgataagaatctaacgagtgtagttgtaaatagtttatggagaaatttttgagtttaattcttccatttttttaagtgtgattaagtttatatatatatatatatatatatatatatatatatattgtgtttgtgtgtgggagggagaatttgttaactcctatttcttagtatgagtttattaagaagttatagctagctattattttaaaatatactaatgatgtaacttgttaatacacacacattaaaaaaaataagtgtgtataagttaataaatattagtagggtttgttaacatagacactcttactttatagtatgagtgctttagcaaactaaaaaaccagatattatcttaaaatgcatcaattatataatttattaatacactcattaaaaaaaatgagtttgtatgctaacaaatttatatatatatatatatatatatatatatatatatacactgaaaagaaaatgatatatactgatgtgagtttgtaattaaaggggtatcatttcttccaaatataatgcaattaatcacgtactaaagttgtagcatttccaataccattcaaagtctgcaacggttttggatttctgagaagatttccttgatatggttccattatgaacaaaatttctttcatttcctaagcaaaagtttccagtctgcactcatgattgtggtcatttggtccgatttcaaaacatgctttgacatcaaattgaaaagtcgatcaattccaatgcaatttttcctttaaatagcgaggttctatcatacatgggtatttgggcaccagctccatatatggtaggaaggacaataaaacctgcacataatataattgacacctaaacactaggtatagtcctgtctatcatatgccaataccaatgttcatgtggcatctcaatgccatttcgtacgaaagggaaagaactagaagaaagagaggtgtaaagttttccaacattgttaatgggagacaaactaactttcacgtgaatttgtataaatatggactatgatttttcttataaaatattaattaaaaaataaagttggatggatgagtttgttgtgtgaacattcaataattagtagttaatgaaagtggtggggtaggagaaatataagcatacttaaaaaaatttatagcggaaagtagaatgatagaaatcacgatataagtgtgttttgtcgcatgattgaaagtaagtaatgaatgtattcgagttttaaaagcaatttatagaatatgcgatttttttattttgtatagaaactaataagcagaacctttgcctgcagaataaactatcaaaatgtactgtatacatgttgctggacttataatagtatttactgtgtaatctaaatatcttgaacagtgtatgacatttttttccgtactttttttaataatattgacaaataaaaatgcgtttaaccaaacttttacataataaaaaaaatctaactcaattagttaaacataatttatgagtgattgaaaattctttaatattgtattcaataaaaactgaatcattacacaacacatcaagttctcaaatttgtattaacaaaattaaggtggataaataagggtgttgatgtactattatgattttatacttgcagtaaaaaaaaacgagtatcttcgaatagttttatcactcttaaaacaaactattaacagaactaatcacatgtttcttcctgttttctaacaggaaactattttcttttccttcaattcttctaaattgttctaatatcatatctatatatcaatccagcaaaaaaatctctccctctctctctctctctctgtctatatatatatatatattaataaaatagacaattttattctttaacaattattttaataaaccatccattttataagttctatcaggtgggaaataataagttgcctatttagcaattttttattgcttatgtggtgtgtggccaccttttttaagatttgtttcatgttttttagcttggaaccaaaaaatttcaatctccagtctattcatttactagttgattaatgccctttgaatataataacttaagactaaaataatatactttatttaaatttctagaataaattagccattccatagcatattttctgaatttgacaatattccttgataaaacaatgaataaagatgtacgcaaagtggatgttcggtgcaaatgggctagtgctcgatgtgtaccgtgaatagtataaatagaaaaaattctgatgtagagcattaatgcaaaattatctttctcaaccattttttatcatttacaactttatttacacttgagccattttacaacttttcttataaattctgtcatttaccatctttcttttacattccaaccatgcatttaccctacttcttttattgctttttatatttaattaggaatagtagtataatttaaagcaatcacgtacacgattaccagactaagaattcatattggggaagataacctaatcctctagcaaatcttctgaaagagatccactgagttggttgttagtctttttacatggttgatttatcctatttcaaaaaccaacaaagggattgactcatctaaagttatgggagtgcactttagagattaaagtacaatagtaaccattaattaaaagacccacagttgagacttgagagtacaatttatattttgttgtatatttatttgatttgttcacaatttcaacagaagattctcacatcaacaattgtgtgtacactttaatctctaaagtgcatctactctcttaattttcatataaattaaactcttacctcttacctcttacctcttaccagtggatgttgatgaaataataaaactatacctatgcccaaccttaagctaaaactcactacttgaaatgcttgtggagacaccatgtcatcataattcatacctttgctttgttcgtaatatctttcctcaaaagagcttatagattgtgaggacattcttctaggatttttatttttatttttttagcttcataagtggaggcacagcctagttttttcttaagggccagccatgttgtttcctttttggtctataaactagggatgcgaataataatcatacatttgaagtctcctttttaacttgttggttgagtttggtctctccagcatatgatgaagcgtataaattaaacaatgctcgtatgaaaacttctctcaaggtataaacgcatctggctaaaatcccatttgaaacctcccttttctggttgattgagtttttgtctctagattggagatgtgaacaggatttggggtcagactaaaaattgcaaaggtatgaataatataatattataataagtagaatatgaataatataattctaaatttagatctctattttttttacccttcatatgccactatgtttttctccatctctttcctaagttttaattctctgaccatgccaagctttttacccacattgggtagtggatgactgggtgtagtgtaatggaattgaatattctctcaatttttacataattgtgtactgttgaaaattgtttatatcctcttttttatatataaatactgaatgtatcgggtcttgtcaaaatttgtaaattaatatttatgaagagagatatggaaagttacaaaacaaaagaatatgtgagaattcattcttgaatatataagtctccttttgaaatatgaaagaattgtttccccccctaaaattttagtgtaataataccaaaaaacatgtgatttcagtacgtaatttttttttttactaaccactgtcgtaaaaatattcattatgaattttttttaataaagtttatttatttcttggacataacggataataaaaggaaaataagtatggaaaaaatatgttcataacaaaaccgcaagaagtacgtttaagaaaaaaatgtgtatatttcagcaacataccaccctgctagctgaccatcacagtcaacatccaaaattttatgttatctatttgaataaataatacttttattatgtaatttaaaaatatttaatattttcatctaattataaaaccgttatataaatgataagttttttttttttggtttttttctcatatattttccttgagaaataatcatgttcaagacatgattgtacattaatatgaacatcttttttgacgaacatttaaaccttaatgtatctcattgtaagagattaaaccttccactaaatgtaatcttttgttggtatatatcgaatttaaccgtttttatattaattactttaaatatcttaaaatcatacaaaaataataatttttgactgattcacattggaaaaacttctgcattaataaccatacatgcctattataaactttgtctatattactctacgcctaggtcactagtttgttctcttttattataaaagcttatcagtaaattaactttcaaaattattattattattattattattattattttggaatgtgaatgggtgacttgaaaaaattaaagatttattgatataaaaggaacatgaaaaaataggaaaggaataagctttttttgccatcaaaatggggaaaaagtggatttgggaaagtcttgataattaagtaagaattttttatacagacattctaaatgcacattattatttgtgcatcgaacattatttaaagggttggttttctggcttcaagaaagcttttactgaatacaataacaagatattgcggagagctttcaaaggagggccctttgagcatcttgaattgctttataaatcggttctgtgccttaatcgttgagaaccaaaattaacttttggtttgaatgtgcaccaataagtgctactcacacttttaaatcaaattccatgctttgattagaatcattctaaaagtttctttttgtcatgttagtttactgattgactttctaattaattgcacaccattaaaagttgcttcactgtgatagtgatttcgtacaaaatcccaaattctttgctagtaggcctaactaccatggtccatggcatactaatcttttagagtattaaaaagttttccccaattattatttaattttttttaaataatgatatttgttttaccgtgtgtttggatgagcgatagaaaacgcatgtcaatttcaacacaaataataattagttctacgttattaatacaattaatttaaacataaatttacctgcaaatgtgaatttgagatgctaaattaaacacacacttggtcatttgtgttcatgctaaaagaaaagaagatagcaaacgtattgggaaacagaaagaagtataactcctaaaatgtgttggctaggtacatttcaattccaagtaacaatcatttgcaattataaaataactgtagtattttcgtctacttgcaattatttttttgcttgaaaatgtttatgtgcttattgatatgattaacttttgtgtctaaaaattatcttattaattttagttctcgtaattttttttataaaaaaatagcccatgtcagtacaaagtggtgatgtagtatacgtatacatctagctgtattatataactaattattctgggggtgctatgaaaacatgatatgtctaaatgtattttacatcattagtaaataatgatggcaattgatttaaaaataaaataaaatttatgaaggttaaaattagcaatatttctaagaactaaattaaattaaattatatttatagagactataagtatattttatccatttatttttatgttgaaataaatgataaaacaatttaaaaaacttcaactttagatttataactgcgccatgcagttcaaaaattaactgcagggatccggttccagtcgttccttcttacaaacaatgtaatactggtcttggagccgagctggtgcatattttattaacttttccaattcagtgaaagtaggttatatacctaaaatgataaaaacattcacaaggatttttatattttttttagttattttgatgtagatttcaacccaaaacttttaagatttttaaggaaataattattgatcctgttaaaatttaccataaaaacaaaactataacgcactgaaattttttctaattcaataacaataatatcatatatttttactctacctatatatagtttttttagagttacctatatgtagttacatccatgccccacgggtaaggagatgctaaatgagccattcacaagtaccgatagtccttatgggagaaaaagaaggcacttactatttacacctccttttactaagtacacccacatatcccctttctacctctcaattattcattataccctttttcttaaagaagtatatcacttttactttctagaaatttatttctagaattatatatagttattccaaaaatatatctctagaactatgattcataatttcatagatatacttctgtaataagtacatattttttaataaaatattacttaagaattaagatgatttacgagaaataaaaaaatgataaacgcttatcttatactcgtatttcttagtctaattttcatcctatcattagtgttctttaaatcctatctaaaatcttattttcatcttatctttatttttctttaaatctaattttaaactatcttctccatatattcattgtataatattgtgttttcatcattattatacaatattttgctttttccatcatgtgacaatgggtttcaaggtacgttcatcattaactctgtgtggcattgaatcattaacgtagacttgaattaaataaaacatgaatgaatatacttaaggaaaaaaaaccatcctcaaaagctttgttttgtaaataaagtgtatattgtatgaatttaataatgaatgtaccttgaaacatagttttagatgaaggaaaccacaaaatatgatataaagatgatgaaaacataatattatataatgaatatatgataaataatttaaaattaggatttaaagaataataaagatacgatgaaaataatatttaaggaacattaataataggatgaaaataagactaacaaacatgagtataaactcattaatcatcttaattcttaagtggtattttattaaaaaaaaatatctattctgcaaatatatctttgaaattatgaatcatagttctagaaatacatttctgaaataagtatatgtaattcttgaaagacatttctaaaaattaaaaggggtgtacttctttaagaaaaaggtataatggataatcgacatgtagaaaggggagaacggggtctaaatagaaagatccaaaaaaaatgttcggcctaaagttataagagttaggtgtatgggtttagcccaacaagtgatcatatcgggcttgttttatttcttcctcttagtttgattacagaaaaaacaaataaaaaagaaacataacatttggtagtaggggaatagaaatgagaagagaagtttaaaattttaaatatttggagcggagcagagaagagggaataaaaaaccatcattctaataatattaagaaatctgaagggatggaaaaatatgtaaagattttagactatagtgattaaattatggtagaatataagctaatatagtctttttcaatatagtactaggtagaattgtttttaaataccttattaacaagttaatagatcagtttaagaaggaggcgtttggtagtggaaattaagttttaacaatactttgtaaaatatattagttaatcctaaatgcttaataacaatttctattacctttgagcataactctttttagttttgttgatgctaatcttatagatctaatttaaaattaaaatttagagatttacatattaatttaacctgcagtgaaaaaagattaatttaacctattaaatactatataagaaaaaaatatttatttatatatctttataaaatttaaattaatagcattaagtattacattaatatttcttgaaaattatagtgttttttttcttcaaatctagtttacttaaatagatagatatacttctctaatttggtttaccgccaaaataaatttggcatcaatttgattttccacatgacaaaatgaaagcaaattttagtcccctaaaaaataaatcttgagactttccattgattagattataaaaacgagaaatgctaagaaaacattcattattgtttaataaatttaagtaattaatttatattaaatataacttatatttatcctctatctaattaagatttgcataacattcatctaacaatataattgagtacaattttttaaatttattaagtggttttttaaacagaattaattaagtgatttgatatgaatatatcaaaatgatatatcccctttgtcaaaatgaatgctttcaatacagctaattactgtatttttcaattctgatttgtcatcgaataatgcacgactattttattttttgtttttggttcctttgattttgttccttattttatttttaaactttgctattaattcttgagaaaatttcttattgcaaactatggaaaaatgttcccataatagtcgtatatatatatatataaatataaagccagaataactaaattattgcaagtagattgcaaattgcaattttggtagggcactgaggaccaaaagtctaagagaggggatgttgttaggttgtggcttataacttacaacgtatttaggaaggactaaaatgataccagttgtgatccactacgaaatggaataaggaaataacacaattaacaaattatggggaagtctatatcatgacgtcttatcttgctatgcatggggtgtgggaacaatttgacagtatgtgaagttttttcccactaaatttcgtgtttctctctttctttttcaatcggtaactttttgagcttgtagtgtttcgtgtttgtgtgtgtgtgtgtgtgtgtgtgtgtgtgtgagagagagagagagagagagagaaagagagagagagagagagagaggctattaccaatatggctccatgtagggaaaagaaacaggcaaattagcagtcaaaggttatgatttctggtgttaccctcattgcacatatataccacatgctgcggaattgaatccaagacttccaacgtaaactttttgcataatcattcaaattaacaaagtgcaatgaatttccaacaactcgttgtcttgctcactttccttaaatttaactacaaaaagtttattgtggagaaagcttccttatcaaagttaggacatgaaaactttctaagtggaattacgtactagtagttgagaatggaatttaagttttttttaaaacaaaatagttaatttcttattagctaaactacttccattaaacatttgattagtttttagttctcgactgaaaatgtccgagttaaaaagaaattacttccatttattagctattcacatatttaaacataagaagtcagtcaaaaaaaggcagcaagaaagcacaacattttttgttttctttttaactcaccgaagttttaaattatttgataatatttaattaaattagataggttaattaggagaaatttaacaggactagttattttcacagttttatgttgaaaatacgtcgttaaaataagaaagatctaacctttcaaaaaaagtatacaaaatacggggcaatcactcactttcattagtggggtttaatggtggtattttgtcgcatgatatatatatatatatatatatatatatatatatatatatatatatatattataaagtatattttagaatgttaaactaaaaccaagattttttgttatcttggtaactcaatatttccatgatttgacctgaacggattccaataggagatgaattgtttttgttccacataaaatatagaaagacgtgattatatatatgtccacgtacaatgcatgagtcactccattactactactagcttgtacaatttggctttaaacccttgagagacaaggcaatttatgttgtctgaaagccgagggtagcatcaattgaagagcggggagagtgataatgaagatggtggcaagtgggtcctccaatagcattagtgtcatcagtggagcaagctatgcactagatagagaatagagatatatggaagctgcattgtgaagcaaagcaaacccaacaccaaaagaaaagtggcatccaaacaaacatgtacatcataatactcttctctgttcatttccatgcttcatccttcatccttcatttttcacctactaccacaaggtccttaaaccccacttccattccataaagcaagccacttcattgaactccaagtttctctctatctttatccatgcttgttcctgaattcatggattgatttgacaaatgtcttcaactacaagatactcaccccaacatacatagagagccaggttatttaactttttgttgccattcattctaccaggtgagaaaaccctcttcttttgctgtttaatcctttagatacttttttttcctaatttccactgatttctagcttgttttataatcaagtttttttgttttggtcttttatgtatccaaaaggtgatcattgatgatccaaatatcaacaccaactctttttctctcgtgtttcctaattttggaaaccttctggctggttgcaaagcaaaattccaaggcataacaaaggttggaacttggaatggattcattcaatcagagtgttcagaattccagcttcaggtacaatccaaattttaacacaaggacacatgcagatgaagaagctgagttctcagggattcttgatatctttgtccatcatgccaggaatattcataacatatgcatctatgacaaccaggatgtgtatgctaagttctctctcacttacaaccctgatgagactctctctacaagaatcatcaatggaggtggcaaaaacccaacattcaatgaaaacttgaggatgaagatcacccaaatagatgctgttctgaaatgtgaagtttggatgtttagtaggtcaaggattcacatggaagaccagcttttggggtttgctttggtcccaatttcacaagttgctggaaaaggaaaggtgactgaagattacagcctttcctccactgatcttttccactctcctgcaggaactgtccaactaacactgtctttggacccctctttggcaatctactcatcagtgaatttgataactgaatcagcaaagaactcatcaatatcatcagaagttattttgcttgatagaaagacctcaaaagttatgttggacccagttgagtatgctagaattgagtttcctgacatcagtgtggtgaaggagaatcagcaaatggtatctgagtacttcaatttggcttctcaaggtactacttctgctccttcaaggtccaacattggagggtcactaccatttcttcaccttggtgcatctcctcaacttgatgattatgagatgactatgagttcacaagatgagaatcatatagggtccatttctccaaatgagagcattcagaactcttgcttcctaggctccaccatcacaaccttgagtgatgatagaaactcagctgattcagttgagaaaaagaaccatttgagcactggtgactcatcaaattctgtaactgtgtcaatcactgtggaaggtagtcaaaactgtggggctggtccagataccccaacttccaagaaagaagaaggtgatgccagaaatgacaaagaagcaaacttttcaagcaaggaaaaggaaagcaaaaaaaccaataacaacaacacagaagctgcaaagtttggtcaagttttttcagctccactagggaacatcaatttagaagctgagcaagctgctatgcaaaaacaaatagtggacatgtatatgaggagcatgcagcagttcactgagtccttggcaaaaatgaagcttccaatggaccttgacaaacctgaaaaagtggatcatggtgatggtgatgtgattcagaatcatgacagcagcaaattagaaattgataagaaaaaggatggatcacgtgtgttttatggtagtagggcattcttctgatcacccctcttggtgctgaaaatagcaagcatatgagattgtgagaatttaattattatagcatcaggtacctacctcaatttcctcagtgatatttattaaagattttagttagtcctggtttgtttgacctgcactttaggtgatgacaataatcttctgttttagatgtcttgtttattgcttaactcatggctgtgcaacccaaaaaatgcttcatgagtatgcatcagttttctatagtgtaatcatggcaatgtttttgtcaattactataccattaaaatcagtgacttttaaagcatgtttatgtactaaaaaatggcaactcttgtaaagaggattagatatatgcagagtaaaagctattcttttagaacctaatgtgactcaattaacaatgttgagccggtagaagaggatatgggttttattcttacatttataaattctatgttttagttttcatatgaacaattattttatgttttaattcttatatttctactctgtggcagttttatattgctagaaaattgagaactactaaaacataaaaaaaattgcatgaataaatagactaaaacagagaatttttagatataaaatctaaataaaaagatgagacaaagtgtaaggatcaaatgattaattaaaaaatttgtttatgagattaatccattttgtgcaatttctgatagcagtagttatattacttctgcggctaattaaattgcaagaaggcacagtgttaatacttcagaggactgagtgtttaaactatattcaccattctacttcaatatgcgatatacgttttccattaaaaactaatgtcatgatcaaaggctaagaaatccgagccaaattttgttgactattgttattctggtgtggtggatggtggggcagattcaccaattttgtcaacacaatatggagctcatcgtgaaaacagttcagaggagacaacgaaatctagtatgtggaatccaaaaatccacgttcacattgttctcgttattgctttttgcacaatcaaaattgcaaaaaatctgtcacaattgtcaacgttactgcatctgaatttaagtggaaaataattagtgaggtttaggtaagaaacaataatcaaacgtaggcacatcatcaatcatacataatttgttttcagctaaagaaattgtacatttttttgttgttgttgttgttgagatgatggttactgtagtagtgttgcttaaggaagaaaaagcatattcatgtttttatgtgcaaaggacgaaaatacgacacgcgtcaattttgttagatcaagcaaacaaagcctattattggcttcggaactggtccatacgaagttgttgatattgactatgaattggttgctttattattacattttgtcctcttaattaggaccatttttcagaagtttgctttgtaatataggaaagcctattggctattgtgattatcaagtgaagacttaaaggttatgtttctgacaagtgatgggaatgggatgggacaatgttcgcccaattatgcttgccttggataagaaatttctcatattttgatatttattatttgaatattaaataattaataccgtatttgatattatatacattttatgttattttattttataaattagatgtgtttactagatttggttaactcaattaaaattaggagcctaaaagtacttttgctctaaaaataattttttttttaattagcagagttataggtggtttgataattgagaaagtacataaaaattagagttataaataaatcatatgtttaaatatttttactataacttattaattattaatatctgtcaataaaaaataaatctttctcaattcatacattagaacacaattttatattaaaatttgaaaaagtatttttgtaattttaaaccaaacattgactacttaataaattgctttgtttttcacacacaaattcgtattttttaaaattaaaaagattttatcttccttcagtaagaaaaaggtgatcttccatgatgtattgtacagaaatttttatctttttatattatccattaatactaataccaaagtcacatgtaaatggttgtaaaaaaaagtcacatgtaaacatgtggtgattggaggtgggtaaacgggttataatatgcgaaccgtccattttaactcatagctcatgagggcttgagctcgataagaaccaacccatttaactcaactcatatacaagttggctcatttagcctgcagtttaattaacaagtttggttcgtaggtttgcatactaacatgtttataattcacataacaaataaaataatgattcatttattaaagaattgcaaaatttatgggtctgtttgttacagtatttttcgtcaaagaatcacttcttcttcttcttatatatatatatatatatatatatatatatatatatatatatatatatatatatatcagttttaaaagttttttttaattagttgcttctttaataaaaatgttttctatgattgtaaacaaacataaattagattttgctactttaaaatctctaaaagaaagaaagaaagaaagaatcatcagtttattttacatcaaagttacttttttttatataaaaaaattgtaacaaacctgcccgatatttgataaaatataatagagataaaatttcttaaaaaaataagattattattgattttataattttttttaaaattaagaaataaaaactaattatatagtaaaaatataataaaacataatattcactttaaaatcagatttctttactatataaaaaaaatagggaagtcccgtcagtcctataataaaaaaaatcaaaaaagtgtgtgagtgagttaaaagtgttgaataatacaataatagagtttttgtatatgtttttttatctatgtattttcgtgtctttaagcaaggagaaattatacaaacatattttctctgagatttaatcgtataaaaaaaattgcatgaagtttgtagagttttaactaagtgggcctgtgtgcccatggtgggtttcactttgctgaaagacttcttcaactggtttattttgttgttatgatgagcatagtttctagtgcatgtgtttgtgagtcttgttctcaaatcaaattccgtgctacaattttgttctctttgcttctttgaccgaaaagttccagtaatacattaaaataatcttttaaatcacgagtattaattaatttaagtcttgaagttttaaaaatatttttttatgtccaaagttactaaatgagcaatatttttagtagctaacgttacaaaataatagttgttttaaatgatcaagaaaatttattacagactgatagatataatatttaagaaaatttattacagactgatagatataatatttttaatataatgcatgtgattgaaagcttaaaattggaaaataaaataccctctatcgccccaaccccgtcaccgtgaaccacctttaacgtttaacatactaagcagaaaaacatggcaccaagcctcagttaattattacaaattgttatatataatatttttaattaaatgtcgtcatttgatggaaaaagacccacaattgtgttaaaaaaatcagagacaaaagaaaactatgaagcatggaacacttaataaagaaaatgtaattaatggcaaatgactaaatataaaatacatgaatttttcagcgatcaaaattcacttttattagaggccaaatacaaaattcataaatttttcatggaacaaaaatatatttaaacaatatatatatatatatatatatatatattagtgaatttgtcccctaaaaaatcttaaacaacactatattaattgttcaaaaaaattgctacaaaaacaatcctttaatgatttaattattcaagaaattagtttcataaaattgtgagatacttttagaaaaaaaaattaaaaatagataaatgtgcatctaaatgaaattctaataagtggatccccacatcatccaatctttgaaactgctctataaattgtcataaaagatacaaaaggttcacaccacgtcctgcatattgtgcccccaatctctgaattgctttcttcctctttgtgaaactaccctccctttccccaccaccatcatcacctctatcatcaactttgttgtcacctatctatgttatccactgagtcatatgttcctccccatgaaccctaaagggatttaacaccaaaaagcctttcacctttacctcccaagaacattcccttctccttcttaaacattcaactctcgaagggaacaacacctcaacactttgctggccttattagaggcaagtttattgctgcggaagaacttgtgtataaatctatttagatactaggctagaagtacttttgagagtttctcttctgaaaaaaatactatatttttagtagaaaaactttcaaaaacacttttgacttgtatccaaacagatcctatgttatggcttcaccgagcatgagtaccaagaggtggggtatcccatcacaaatccaaatgttcaacctattataaatagtactcatgctaaccgttatgcttctattatgagtaatgctatcaattatggcatcaccaacaacactgttggagcttcaacctcgtctcaaatgaatgcccaaccccctacttctcctacagatttgaacatgctcaattggaacaaccccaccaatcaaggtgacaattgataaggagggatcagaaagcttcatttgcgactttatgtgatttgaataatacaataacaaacttatcgtttatgcttttacctatgtatccgtgtgccttcacgcaaggggtaataattatacatattttctataggattcaatcttgtagttcctaatttttttacatgaagttttttagagttcttaatcggcggagttttggtggcaatgctgggtgtctctttgctaaaggctttctctagctagtttattttgccattatgttgtgtacagtttccagtgtcgatgtgtttgtcaatcttgttctcgaatcacatttcatgttagagcttgttgtcgttatttctgctctgtttgaaaagttccagtgataaattaaattaatctcttaaatgacgagtattaattaacctaagtcttaaaatcgaagaaatattatttttatgtcaaaagctactaaatgctcattattattttagtagctaacgttaaaaataataattgttttaatacttgaaattacaaaaaagaatgttttaattaataattaacgttaaggtaatgacaaaagatttttcttcttcaaaatggagtgttgatgcataacaatgaggatatacatctcaacaatgttgacacctacatccttgttgcaaaagaattaataaagaatattttgattgaaaacaacgatcaaaatattttaacaatattatattatattttataaaaaaataataatattacgaatactaattaattattcaaaaaataaagatttgagtgactaagttggatcaagactttttcaactcccaagttgcatttgcctctttgtttttgttttagaattaggataaagttatccataaacacttataagaaaagaaaataagaaagaaaaataacataatgatatgtttgagtaagggaacagtggccaaactgccacggcttgaaataaaataacccaaaaggcacgcagcgaaaaaaatttcccccaatgccacgcggcatagttcgcaggtactataagcggatttagtggctgatgtggcgcgtcgcaattggctgtggaggagggcgctgacacggtcaaagctcgctagtgtttattgcgaatttagtggaattcgctggtccaccctgcggactatgtggaggtcgctgtacctggccgcgaattgtgtgtggacacgcgcgtttacctactttgcatggggctccagcgagttatgctgctggtcactttcattgtcccccacaccctcagcttgcttcctctgcagacatccaggtacttttttttttttgtttttctgtttgtattttttataatttggttatttatattttaattaggtaatttataattagattagatgatattaaatattagttcatacttatttagttagaggttatatgatgaatttatagaaatattagattaattttttgttatgttaaagtacttataataacattaagcaaattacttatatattaaagttgataaatataattagctttgtactccatgatattcatggttagttattttgttttacttttgtgtttttattttttgtaatttagtcatttatattttaatttgtgaatatatttagtatttatgtagttttagtttgttaaatactatttatgttggagatttaaaacattaggttagagtatatttaatgttagtttataattatttagttagaggttatatgatgaacttatagaaaaattagactgaatttttgttatgttaaagtacttaatttaatttatttaagtaaaattaatatatagtaacattaagcaaattaattatatattaaagttgataaatataattagctttgcactccgtgatgttcatgattagttattttgttttgtttttgtgtttttattttttgtaatttagtcatttgtattttaatttgtgaatatatttagtatttatgtagttttagtttgttaaatactatttatgttggagatttaaaacattaggttagaggatatttaatgttagtttattatagttgataaatataataaataacattaatcaaattatttatatattatagttaataaatatatgaaattagatatatttaattaaaaatgacaatgttattacattaggatattaatttgtttgttaattaacgtatataattttttagacagattacacatttgttaattaacgtatattacatttgttgtctagcagtcaatcgagagacagattatccgcgttgtaatttcaacttcttgtaaataattttcatcagatcacgatggttacatcctgggagcatgtgaaacattttactttctccttcaaatatttgaccattaggtccaaaatatctactcccattataatacacaatggtaattagatcatttctactactactcattttgtggtaaaaaaagtcaaaaataacagaacaacgcctttgggacaaaaaattaataaaccaatttaattgaagatctcaactaatttaaaaaggggtgtaaatagcaataaattccctgtttcatgcagtaaaatatgtcacctaatttactgtgccaaagtgtttgaggctgaaaaatgacaaagcaaaataacacaaaaaaattaataaaccaaaataattaaagatctctactaatttaaaaaaaggggtgtaaatagtaatacatttcttgtttcatgcagtaaaatatgtcacctaattcactgtgccaaagtgtttgaggctgaaaaatgacaaagcaaaataacacaaaatatattgggtgatttaaaaatcggacataaatactattcacttctgtatagcgtgtgagattttgcggtttttttggacacaaggtgtggaatggggtttataaatagtaataaattcggtgaaggggattgagtgatttaaaaatcagacatacaagtatagcgtgtgagattctgcggtttttttcgacaaagggtgtgaaatggggggtatatataggaataaattcgctgaaggggatggcaaaatatgtcaaataattcgcagtgtcccccagcgaattaatagggacctaccacgaggcagaagggctcagaaagccatgtaatccgctaccaggtaaaacgaatttgccacgtaatacgcagccatgcaaagcgaatttgtcagagagtacttcgctcctctctatagcgacttctgtttgccaattaaatgacgccaactcagcaaataaacttcgctggtattgccaacgaagtatgttccgtggcattatggcaaaattccttggaggcgtggcagtttgggttttttatttgccaagtgtggcattttgggcaaagttcctttgagtaagtttatctataagcatatttaggagaaaatataagttaaaattagcttaaagacaaaaattaatttgtaaaaactctctcatataagttttctaaaagatgagtaattagaacatgcataagttaatttgacgttatatagaaatttatttcatttttttcctacaattgctttaggataagcttatccaaatatgtctaagtttcttcataaactaaatgatcttatgcataagttgagaatcaacttttggagaagttaatatgaaagaatttatatataaattagtttatgcataagttaattttagcttctaaggaagtttttttttcttattatctttttgtatgtatttataaagaaaaagtgtcccaaaaagaaaatgtggtttaacgatcgaggaatcagtctctaacatttacaaaactacagactaactatggaattagagaccgaaaaaatatgtcccaaaaaccaaatcaataactttaaacagttgctaatttaaattactcattcgtctgctgtttggtcacttttcttggcaaagggctaatatctctaatttagtcactgattttttttaataaaaaaagtggctatcgctgtgactcctgtctctaattcaatcacttaattttgtttcatatttttttgaagtgattgtagaatacactttagttgctacatcagtggctatatagccactgaaattctttggttgctgaagtaaataaataattataataattgatttttaaataaaacaaaagtaattgtcatttcgatcaataaattgtgacatataactttatgaggttaagagtaatgtcctttttaatttagtgacctcaaattacaatatgatgcctggtttttgcttatttttttgtaattaataaatatttagcttgcttagtaattatgaacaataaataaaattttaaatcacattcaaacccacaataagatatataatatattcataaaaaaatgtataataaagtctagtttcaatacttgtaaacaacaccaaacacaatgtatgataaaagtgcatattcatatcccacattcttataatcttatttattatttgtaatatatgtgaaatgtttttttaatacttttaggtttattttttaccaaaaaatatcataaatctttaaattcttttataaaaaaaaactatgttgtaagacatttttatttttatgttaggtctttttaaaaaaataaaagtttaaaaaattatttcaatattattttgttatttttatttatattgtaattatatatgaaatattcacaacattattaatatcaataattaacaacacatttcagatccaaacctctgactttcacacatggattagaaaaatataagtccttttaaaacattttactacggatatgagtgagaatccttatataaagacttaagattcacatatattattttttttaataaaatagtgtatttaaaagatctgcattacgagtatttaaaaaagagaaagaaaaaccataaacctgcggagatgaggatgaaaatgtaagacctatttggaaaaaaaaaaaaatcttgatagaaacttcaaatagaaacaggcagggtcagcaaatcacaacaaaacctcacattctaagctctaacaaaaaggaagtttctcaaacacagaagaagaagaagaaaaccatgttacaatgccttgagcttctctctgctgtcatcttaacatttttatttcaaacaaaaagaaaagaaagaaaaaaagaaaaacagaaaatgacagacataaaatgcagcagcaggaggcaggagcagactcatgatgcatacggtggttcaagccgatttggttgccggcggcgccttgctcttcgccggagaagtggcggtgagaggagagtctttgatctcttggtgggtctgaatgcgtgaggcttgggcagcggcggcggttccggtttcttcggtgatgatttgtgtgaagtcaaagggcttagtgaggtcttcggcggcgaagaggtccggcggaagggcttgggagggttggcgtcgatgaccggacatggttacttctagttcgtactaccaatgagtctaagagggaaggagagagtgagtgtgacaataaatgttaatgtgattgggattttatggagatgacaaacaaactgtggttatttggttatttggttcttactttgattctcgtatgtaaaaaaatattagattaacaactgtcattattaatttataattaagtgggtttgaaaatgttcatatctctcttactcgtcataaacttaatttagggtgtaccagtacaaagctacaagggataaaaatacaaaagaaagctagtttacaagaaagacaacttgccaagtgccaatgtctacggactacgggttcatgatttgattttcatgttaccttctacaaaagaacttagaattttgtgaaatattgaagttgcactttattttatgggggtatgtataaaaggtaaagaaaattagagaaaaataataataaaagagagataaattgagtaagaatggtaaaggtataagtattcatactcacatatatacgagataaatgagaagttgaaagagaagaataaccccgtgtcagtattatttttctattcttttatccttattcatttcttttatcccatatgtatgtggatatggattttttttgtataaaagaaatgtcaggttaattattatattccaaaactcaacttctcttccattgacatgctagatcgagaagttaagtattttttttagagaagatatcgagagaagttaagtatttgaataaaacaacttgtcatttttattttacaaatcatataatttttgtgaaaggcaatcctattttgaataacaatgacaaaaatattcatatctgaactattaacttctcttctcactctcacttttttctctggtcctttaaactttgaaaaatatttctagaagtttaaaattctaaaaacacttatataatttacctaactagtcgtaatattcctgaaaatattgtttatgagaatgcaaactctccccatctcaatttccttcgcaaaatgttttaatagctagaactattattaagaattgaacccatttttgtcaatcgcgtacgattgttcaatcctaccaattaagtcatcccttactggcaaggttagacaaaatttaatttgaaaatgctaaattattctaattaacttggtgaaaccctacatgttggtaatatggaagaaacccatcgtgcaatgacggagtggatcgcgatggagagcgatggaacaacgatagaaatgtatttatatagacacaacgcccaaataattaagcttcagtaaatgtaattgagtaatcaatcaagagtacttataggaatgtttggaataaggtatatgcaactaggggtacattccgttctatcaatatcggatttggcgatttttgacagttcaaattttagaaattacatccgatgtaatttgagggtgaattgggttgtccctgtcaaattcaatgtattatattctttaaagagtatatataatttttttgaataattatttatagcagataaaaggtactgtagtattttacataatataatactatatttataatcattttatttattttcaaatatatattaagccttagtttaagttttatatatatatttttttattgtattatttagttttacatggtgctaaatcaagtgattgaatgtaaatgattaatgtgttgaagttaatattaaatttttaaggtaatatctaagtttgattattaacgaaaactttattgatcttttaatcaaattcttaaatagttagagtctttttttctcaataaattagagtattaagataataaaaaatctttacacaatgttaaaattgatatactagaatcattaattaggatagaacaattggtgagaggtaatttgcataagatcttctattctaatttgttttcgccaactatatatgtttataaatttaatttaattacctaataatgtgttatatattatcaagagttttgaacaaattcaaataaatgatcctatcataattttagttgaagaagaaaaaaatactcatcaccttgcatcatatgaattcatgatcacccttagatgcaagcagtggtattggtcatggtcagaggttagggcaaacgtgggccacaagctacctggtcatgctattagtatgaatagtcctaaaaacatgatgcagctggtacgaggaggatgtggagcacaagtgaataagtcccaaacatcggggtcatgcaaaatctaacttgcaggtaagtaaggttgtcaacccaccctaattctgcatgttggagaatagaaggcatatggttgaattaccaaactttctatatatatacacgaaccgtacgtgttgatagtttgtaagtagaattaacatatgtgtaggaaacatctgatttagttcaaaattcaaatgatcaaaaggagtaatatgctgtatattattttataaatgttcatgttcatagaagactttttaattaatttttatatctagataatttcaataatacgcatgttaaattatcattaatatttaaaaataatatattataaaaaattgcataattaagattttaattttactatatattgcttcttgtatagacattgcctaaagtggttgtgtccactaccactgttaatatagttttttttagtgcttctcacggaacattctattcagatcgatataatgagatagataaataaataattaaatattaattcaataaactcttattgtataagggttgatgtcataaaacttgttaaaactagtttaaaagataactcattactcatgagagtcgcatcttctttcataagatcaaataaatttctcgtagatgtccttaataattgataaacacgtaggagttgtctattatagagatgtactgctatatagttaacaggtttaaaacacgtaggggcatttagattgttaatttaacgttttgaattcaagtaaattgttaaagttgttcactgttatcaacatttatcaaacaatttaactcaattgattaaatagaatgtgttaattattattaatcatttattatcgataaaaaaaaataatcatgaacatttgggggatttcgatgaatccatcaagcaaatggatggcatccgaaaggttgcatggagattttctccagggttaagttgaaaaaaatagtgcaaaaaatgagagattgaagaaaaggaagatgtagtatatgtttgttttttagttgcaaacagatgtttggtgcaaaatgaagtttgtaaaagctccagactcttcttttaataaaattaagtttgcaaaccattagatttattttgggatttgtatactgcattttgaactaaaatccaaacatgcacttagaagataaattttaaagtactgaaatcaaggtaggaatgtaggatgtagggacattgatggcgtgtcctgtattctcttaatcaaaaggcattgatgagtagtttgttttgcattattcttaagagtgataatggtcgcatattttgtacttccggacttaaatataagcaaaaaaatcactttataggttgaactcaaaataagcaaatcgaactaaattcattctaattgattatattttttttgtaaaatatcatttatttaattgcaattcaattttcaaagattattttttattcataatatcaagttccaataaaggcattgtaccaataatcttattttttatttgagattagtataattaaatgatgtcaattaactttcttaattggtaattaattttgcttatatatgaatccgaatataataatcctttaagactcttaattttggtgttgtgaatagcaaagttaggacttcaattttcaagttaatacaagtttgagtctagggatgaaaaaataaacatcttgtgtaagttgttttagagtatttttaattatagagcaaagaaactaattatcttatcattacagtagataagttagttatagataattaatgatcatgagttccaagtcctttgttaattcatgtaattttgtgagggccagagatacttgattataggaaaattctttgtacccttggaagagttatgtttttcatttgctctcttctcttctatttttttttcctttttatttgtccctcttttatctactcggacactccaaatttatttatttaatcaaaatcaggagatgtactagagcatattaaagaatgtaattccaactagattgacattacgatcatcaataaccaaaacaacacacttctctgtattatattccaaaaagaaaataaagaattgtgggaaaccaaaatcaaaattcatgtataatcatttgaacctataacaaagacatattatatttatttctaaataattctttctggataaaataagaaagagagtctcaccaaaccaaatcattaatgataatatcatgtgaaaatatgagatataaaaaaatatggaatgaataagatttatgtaatttattcatctattaattttcaagtcttcaaaatatcacttttaccgacttaaaagtttgaatagtaagtatcaagtcacactcaatccaaaactttctctaccctctagctaaagctatctttataactatcatgaccccaacatgcaaattcaacataaatagcaagagaaccaagttaaaagggaaattaattaaaccacccacaactaccatatatattcagcattttccatttaaaaatgctcaaaaggctcgcctatggagctcctagattttgatatacaatcataaaggagtggtgagcacattcaagcattatatatgcctagcgtttgtattttgtttggaaacttcaacaaataataatttaaataaggacatactccttctaacttatttctttgtaacatttgctcaaataatggaaatatatatagacactagcaatttgcaaaatgggagattattgtgaaatatggcagttatccaaacccagtgcacatgcaagaacacgttgtgtatactgagaaaccaccggtcatcatggtgttggggaaagaaggtgcaaaaacatctattgcccaaaaataaaatctatccatgtttaacaggtcgtggtgtgcttctccattatttttacgtgtacaattagggcaagacacacgcgcgtggtgtgggatgtgtgcgaagaggaaaattcattagagactgaaatgatggaacgcgtggcgacagaagagcctcatgttaacaaatttattatctctgtgggtctgaatgagttagggcttagggcacatatagttcaactaaccaaatctaaaaggagaaatttcactgcttgacatgcttaggacttagataccgttttatatcaacattatatttgccaaaaaaataataataataatatcagcattttgttgatttcattgatactaaactcacatttagtatttttaaattaaattgtgaatttaaaactttgcaaatataattaaaatataattcaaagagagaatctattaaaataataaatatttttcaacaaatattaattaattactgagaaaatgggtgaatatttcacacttataagttataatataataacaaaaaataataatttcttatgtcttcaaaatagtagtaattgataatgtcagataaattaattagtaattaaaagcatagttaacaaaaaaaaatacatataattatctcgtcaaattttttagtaaggtgacatttcaagacatttcaattatatgtcaatattattgttacgttatcacattgttatctgataataacaaggattaaaatttttaaaaaattgtatggattaataggaaaaaaaaaacttcataaactaaaataaaaaatgctctatttgatgaggataaaaacttagttaaatctgaaaaacgttattgacaaaattcaaagtccaaatgtggtcgatactcttcaatcttgctcggccagttgatttgcgagaccatattatatatagaattatgaaaatctgtattttaacattctaagcaatgttatatatacttcccttcaaataccaaaaattcacattatttaatttaatttaattgatttaaaaagatgtaattaaatattttaattaaattgtaaaaaaattatattataatttaatcttagattattgtaaatgataatattttttaattttgtaacaataattaattactttaaaatttataattataattataattataatgttcttaataatttagcagcagtgcaaaaatatctgaaaaaatatatatgaaaaggaaactcttgaaaagatatgtagtaccagtctgacaccctgcatatatatagaaatacaatgaatcttgtgcataaggatataaaaattagatatacaaaattgagttttgtattaattgagcaaaaaatgttctacatacatataactaaacaaaaataaatgtagtagaaatttaactaaactctttataaaattaattaataattaactcaaattccaaaattgaatattcgtattattaattaataatatcctactattatataattataaaaaatctcatatagtattattcaaaagaagacaaacaggagcagatatccagacgcagacccaatgtagtatcacgttacgaagataatccctcagtcttgggagaatccataactgcaacgtcaataattgatgtacgatgctgaaacaattaaggtattattttattactgtattaattggttcgtgacaattgccaaaaataaatgaggggacacgtactgcaactgaacactgatctgtggacactgcttttgtctgcatgcgcatatattcttctaccaaaacattagagtgccaaaattattcttcaacattatccgtagaaccaaagtaaaataaaacacaatatgtaaatgtaatattttactgcattatattatccacgtacgtaccattctgcatttcgctccttcatatgtccccaactcttaaaaaaaagaaaaggtttttactaagaaaaaaaattcaaatttctcaatttatggcttttataaattaataaggtatcttaaaattgataacgagtgtttaaataatatctaccgagaggatttacatagaatttattggattattttggataaaatatgtaggaataaagaagaggaggttttttcaccaaatcagaatatctattggtataaaattgttttaatttaataagtgtcttaagtttaaattttaatgaaatatacaattttatcaaatatttgaagaaaaaaattatgttatacatattaatcttacttgactcaaatattattattttctttaaacgatacaagtgatttatactataaaaagaaagatcagaaggaattttgaagggtcatgtgaaaatatcataaagatatttatactataactaattttcaaataattatatatggagtatgagaaccatacataaaaattaaactcacattgtatatgcctttgaatgaaggttaaaaaaaggtcttggtttctagatactctggagttagggagattgaagggaatgtgggagtggttaatagatttagaaggtgtgggtatggaatcttgataatgtggggacgactatatataggccaaattggttggctaccagtctgccacaatattaaaattaaagaggtgggaaatgagcgtatagtaccatccttatggcatgatttatgggttcgtgggaattccttatgtaaatcagtaggttatataaaatagcatctaattcagataccaaaatagcatatttagaagtgtggggataaagaaacatggtaatcgaagtaggattggagaagacttacggtttttatttgagatgattaacattttttatgcaaaagtgaacagtattattaatgttgcagaaggacagcattaagacgaacagagatatggaaaactaattcgatcagtgagtgtttactatatacacaaaatcaagctatttaagtctaatatattctaggtacatatgataaaaattcaagtagttatggctgcatgctaagatgaggattttgcttacccttgtatgttatagcaagtactgaaatctcgtggcttagcttgttaattaaatttatgcagattaatttaaaattaattggtcgtggaactagcactactgcatgacataattgagggcgttaattcaagttgcactagttctattctattttttacgttcttattgaagcaggtttaattttgtgagttatcgatcacttgtacgttattcgatagtatggtgttgtctttctagataatacacactaggattaatttcgtgtggttatattcgctggtttagtatttctgtacgtggaaatcaatttctaatgaggctctcttgagaaggtatatgggcatgtttaggtttctgtttgcagcttcttgatcggacctttgcaaaaggatcttaatttgatatatatactttgggtttaacgtactttcagaggctggccaacagatttctaaacattgattatattggtgaatttgttattgcttactagggctcggatggatcttatggtaccaaggtttatttgattataccttttaattagttgtaattgttggaaatattttgcaagatttgagtacttctagcttgtattcacatttaataaactttgtttatataaaaaaaaggcttacatataataatatgcttgatcatttttaaggcagaccttgtatttaggttaattaattttggttttaaaatctcaaactatacaaattggaggaaggaatggatccaaaaatatattaaattgttgaattgtttttttatactgttatttaacttcttataaataattatttaataaataatgattttcaaaaaatatttattattaattttaaggaaattaaacaaatatccctccttccccgggaaaggaattttacgtagtcattttaatgtttgtgatacaagaaccaatattaaaaaatgcaaagtagattttttataagtaagtaaaaaaaataattaatcaaataaaattttaaccgatgtaaaatagtttccatcgatattcaatccccataaccatctccccaaaatttatcaacaaactcgttcacgtctcttcagttaaacacatccctctatttccctatttttttttcgcattgcgctctcctctcattatatcatcacctaatcccaatccaacaaattttacaaatcccctcttctcttcgtgaggttcccccaatccattcccaatttcacaaatttgaaattttcctttccatcccaaagggaaatcaagttcttacatggatcaacaagacgaagaagcgatttccaaaaccataaatttgctaacaagatcaaagttgttcctaatggcctttctactgattcagatgtggccaaaagatactatgtgttgtgcgaattctaacaatggtgatgtgaatgaggaggattttttatttctagttatttaattaaaaatattatatctaacaaattgtaattaatagaatgtcggtgtcacatattttctcctgtatgttaaacatttctttttctttattcaattccttttggtcaattcaaactccatctaagaattattgtgatgcaataaattttgaccagttaatacaagtttatagtctagtcatcagtgttttttaaacatgacttctaatgtctctttcttataaaaatatatttattaatttcctcctccatctcatttttcaccccctttattctcatgtctttcttctttcagcatcatgtcatttgtcacattttctctcttttttatacctttatcgtttcttccacatattcatctcatctctaagtgtgggttggtcagtgtttttatccccttacatggtcaacactattaaaataaatgaaaaaatattacaccagattaatttatcaaatttcgaaatacaaattaatttaatttcaaaattataattaatgtatatctcgaacttttgggatcgaagcagaagcggaggcaatgagattacagtgtgaaatgtgatttaagagcaaaactaacaaacacattagctatagagattatccacaacttaatgacaaaataaactagttagaaagaatttttaataaagagagtcacatctaggccacctaagctccctcagttaagagttctaaaaatatcattaaaaaaactacaagattaaatctcataagaatcctgtttgtattattacttcttgcctaaaggcacacaaatacataagtaaaaagcatagagaataagtcctttgttttattttgaagactcaaaaagtctttttatttttttatccttccctagtaattatcaccctaattggtcgggttgttccaatatagcatgttcacatttgtaggagtagaatgggtagcaagggattggacattcatcggaaatgaggttgaacctccagcagataaatcattcaaatcattcaaatcaggatgattataactattgttggtgaatctaagacctgagcctagtgagagcaatcaatttttaaaaataaatttaataataatcatcatcatgaataaataaataaatattaaacatataagtgaagtgaaaaaataaaactgagtttaaacatgtaaaaataagagatataaataaaattttaaaataaatacatatagttttattaaaataaggaaatgtattatttattctcaaataaaaataggttagaggtttaaatatacaagataaggagagtaaaatataaaatttcaagataaatctatacaactttatttaaaataaggaggtgcatttgtctgctgttaaataagttaagtgtaggttcgcatctgtcacgtaacgattagcgtaagtactattcatagtaggttgaacatatggattggtggtgatggtttgcaccaccttgtggtactcatggttcttggtgataaaagcgaagacttgtacaggatctgcaacaataagcttggttccaacacttttggttcagttgtttttatgcatttttgtggagcaaattaatcatattgctgctggcacgagtattatcaaagccgggtctgaagtggatatgcagatgggacacaaataggaaggagggatgattgactacacattggtttaaggtgtgacacatgatcagacagacaataattaagcaatataagtattttatctttatcagaattcatttttaaatgtatgctgaagttgttttaacttttaaggcacaatttgtatcagcttttgagttcaattacgaaaaaagaggacgcaaatgtgaatatgtgtgtacagggtatcagagacaaaaagtcatctaacaaaataaaaatatgagtctctggatcataatatggagtttgttcggtttgattggatttttataacaaaatttaaatcagaactaaatcgtaaaaaaatgtgattttttgaatttttatttttatgattttttaatttaagtggatcaataaaaaatctctcaacagcacttctcgcttgtatttaagcagatcatatattaggatttattggtaccaaggcaattccaaaatcagtttattgtttagtgaagatgtggttaaatgttttggtgaacaagtctttttgtgttgtctggtctttttaaacataaggaggatgtttggtgctagcgttttatttagcagtttggtgtttggttttttacccgttacaaggggttttttttttttttttttttttttttatccttgacatgtttgtaattttttctacacatttgaggcacagcttgtgctttgagtatgtattaataatattattcttagggtgcgatgaggagttttagacttttagtagcaactgacatattttttatttttaagttgtcatagactctctttgtttatttgtgtcttggtattttacctataaagaacggttggtttcattggtagaaaataatgcactgcatttgtgacattaggatgtaaatggtgtaatcaataacttggggtttgacatacatgttggtcaatttcaagtttcattaattaataaaattaatttgcttcttaagaaaatgtcatacattttttttataaatatgtttgatttataaatttctatttaaatttatatctacataaaaaattcagtggattactttttaaaaaaaccacaagttatatactcatttgataaattttctagatccatacttattaagcgagaaacattatttgaagagaaaaacaataattttttttgtttttttaaaactattttaaagtataaaatatttcaaacaaaaaatatatatttattattattttaaaattaattaaattatatgatataaataattagttatattatgataataaattataatcataaaattgagatattagatttgatctttaactggtcattaatgtttttaattattttgattttattaagctttattttttttcaaaaaaatttcaaggtattacttaatttgattttatttttttaatttgtggatataattttaaatactgcgatataatttagagaaaaaaataaaaataaaatagtcatcgaaaacgaatagggattcttattttgggttaatagtaagtagatagacattgaatggttgaacctaaaatatgaattttacaaaatttgaagactaaaattgcataagtaaaacttgagagataaaaattatagattaaaaattcagaggcaaaaattacatattaaaaattatataggaacaaaaaaatataatttaacctagaatctgactgacttataacacttatagtgtgtttatgcaactgcattacgtatttggaggtataattttattgcagagagtggtcctatcataattgatatatatggtctctaaaaaaatcattataatttaaacatgaggtaatattacatcaaattacttacattgcattacattcaattttaaaataaatttaaaaatgatatactgtgaaaaaataattaattaaatattaaataattgtttttaaaatttcatttcaattactatcattttattttaataaaatatttaaaaatgtctcttattgttggttctagtccaattgtgtggttttatctcatattatgtcttatttatttttaggtaaataatcatataaatatatgtcgcgcgtactagagcaagtatagaaacaaactaagaggttgtattgaatgtatatttagttgtgcgaatgcacgcgtatctaactaagaggttgtatcaaatgtatattaagtgatgattttttggtaaccataatttgaatagacattctccaaagataggaaaaagtagctacataatttatcataatataagtaattatttaatttttcattttttaaatcttattcgtactggtgtagatgaaaagagtacttaaataatatttattcaaatagatcttacacccttaattaataatatatttgactaaacaaatttgtcttttactttcaactttaattttatgtagttaattttttcttaaggattttttaaagaatttaaaatctaaattttattagttaattattttattaagtataccaaaaatgtagagagaaataaaaatacgtacaaaatataatgtgactactactataacttatttatatactttttatctttcattctttattttatactcttcagtgtaaaagcattaggataatacttattgatcttttgcatgattaactaatattatatttaattgaatatacattatctaaaacttgtcattttcattttttattttcttatacttatttttaaattttgtaaaacaaatagcatttaaaactggtttaattggtagcaaatcaagacaattaaaatttagatgaatgagaattcagtaaaagttacttacctgatgttatcggtattagttactttctcatttacagtaatgtttttaaagtttataataaaaattaattaaagagaaaaatatatgttttgaatgttaataataattattttattttattatataagaataaattaaatagatgggatttttaaaatatggaaaaaaatcatgaatttttttttctgaagggaaataaattatttaaataaagacatacaatcttaattgatatgttattttaaaattgaaaatttaaatgaagattaattaagattacaatagttttaaatttatctttaaaatatcttcaatttgatgtaatacataaagatttattgtttaaattaaaattgaaattacatgatatatttttaataaacttataatgtaactcattaagtaattcatagagtttactgaatgatataaggtcctattgcatgcaacgatagaatagccttcgctgttagtgggccaacaaatttttcctatatagacattaatttttatataaaagtcttatttagtttttggataaaaaaactcttacaatgtgataattcaaaatgttaagtattttttttggtatcggaaatgctaactactttatatagggaacataatttaagatggaaaaaaaaaaaaaaaaagcttgttaattatttattattgtttagaacaattcattaactataacctctttctagcactcttattttgagaatccatactaaagtaatatacgcatcattttcaattgataaaaaaaatacagaccattttcatttaataatatactacgtacatatagtggatttctatattcaattaatatacatttaaacttataatatactacatatagtgtattctcatattgaacaaaaaaaaatgcgtcacacacagctcacaaaaggatcttcaacaaaaaaaagagccacacgcaactcatcaaaggattttttttcttcttaaccattaaccacatattcattcataaaaaaaaaaatattctgattaatctaaaatttaatcaggaaataagtaaattctaatttttttttttaaacatcagactcaaatattattcgaacgatttaattttaactttaataaaaaattatttatgttcaatccttagttacttatcaataaactaatatttaataagattaaaaccaaaatggaaattcattattcaacaaatcaaaacttatatattatttttataattttaatgaaaatcagttgaataagatccttgagctaccaagtagatttgtctttacattcacatgtgagaaataatatatttattataagaattcatttttaattatttttgtgtgtcaaaatctctttgaatcaacaaaaattatatactataagtaacatttatgatcgagtgagtttgatactcttaatatctaatacaaggtgtatccccaaggaaaaaaaaaacatttattttcatatgaaaagtcacttgcaataattaaaaaaaatagagcacaataaattagagttatcaaactttgccatacgaacctaaatgaggaccaaatctgaacatttttttaattgtacgaggacaaaaaatatatttattcactaaaacaaaaggaaaagcaacattgatagaaaaggacatgccctgtggattgcaagtgcatctctttggatttggattttggagtggccttttgcatgaatattcattgtaatggaggctaattagaatgtgtctgaaaccgggatttgcgtccaatgcatccccatgaacagcctttcttaaagctttcttcattttttttcttctttccttttggttttggtgttgtgcactaactgcaccatcatcatatatcatccctttcactctcattttttttttccttttaattttatttccattttggagtcaacagatacaatacacactcagattcatcatctcagtctcttccacctttaaacctccgcgttttctagtgccttccttgctacttacacccgtgactgaaaagtcaacccccccacaaatcccttttccacatccacccctttaccttttttcctccaaagtttcattcttttgcatcttctctcattcaaagtttgagtcttccccatttggggagccctgaattgccgtgcaagttcagatctgtttacgtgagtcttccttcattcatgttcaagcatgcgttttcaccttttatgcgtttcagattctggggttttatgtagtggtttttattgtttgttttttttttttttttttttttttttttttttttattgcattggttgcagttacgtggcacattaactactttatgttatgatgcaggttttttttgtgtgtgaagcaaacggttaaaggattgttgtgtctgttggctattgctatgcactaaagttgtgattttgaaggactaaagtgatgtgagtgggggtttaaaagggttggtttctgggggtttctgagaattcatatttgaataggtgaagattttgaaaatggttgtgagaaaaagcatgggacgggcaaagtcactgcttttgctgctcatggggcttctgttttcctttgccacttataatttggtagctatgatcatggaccataaggcagatgggttggaatcttttcatagaaaaattatgaggtcagaaaagactaattcaaagtttcatgttgccatgacggcaaccgatgctgcttacaatcaatggcaatgccggattatgtactattggtataagaaagtgaaggacatgcctggatcagacatggggaatttcacgcgtattttgcactctggaaggtcagaccagctgatggatgagattcctagttttgtggttgatccacttcctgggggcttggataaggtaaatgtttttctgttaccccctgcagaatttgtatctttttagcccttttaaacttgcgttttttttggtgaagaacatacgtcatggtaacaaataacgatcattcagtgaattcttttagacaacatatttcacaaataagtagcaacaacaaattaaaatttaaaacatattacttcaaccaaacaatcatccccatttcccccaccccaaacataataagagtttatttttctaaagggaggaaatttctcttcacttgatgcaaatgcaatgagatgtgtttaatgggaaatgggattggtttatatgatggttttgtttgaatatcttgcatgtttcttcgactattatggcactggttattttaactatttggtgttctgcatttggtctgccttataatgtagtagtactaatgattgttgttgctactagttttttggatttgaaaagtcatttccattattttttttcttcttgtcaccaaattaatctttttattgttgatggtgattgtcaattttatatcgaagtgttttgttgctactgtttaaggtctgatgcaaaaaaatggttgtgtagtggggacaacagaaactgaagtgcagaaagataatatgttaatatgcagctattttttgagcatttatggtataatcacatccataacatagcatcatcttggtttaagaacaaagcaaagcctctggggactcgtccatactccatagtgcaatgtttaagttacatgttaattgtttttaatgtccatctataaaagactctatgatccactttaccacatgtcattatatgaaccttggtgggctctatatgtcattagccttgcatattgtattgtccctgtcaaataatgaaggtttatgcacgcagagaaaacagggaatagagatgaaataagaactgttgcagttattttgcttctttatttctgaaataatcagtttccatccttgtctcccttgtatgcctacctagtaacacagacaatatcttagtgattttgattttctactgtctctcttccttgtaactgatattttttttctaagcaaggtaatgttagagcaaaagagtgagtatttttccgtttactgggcatcttactgtgtgtatattccaaattgtcaaatgtgtaccggtagtatttgttgaagttttgcagccaaggggaactctcttagctgagattagtatgtgaactcacaagtctcaataagtgtatgcccaaataagctgcttttgagcaatgagttttgataacctagatttaggttcatatttggttgcagtcatgctgtccagtggcatgtttgttgacttaacacgttctacactgttgatagttataaactctatcatgaatgtcattgtttgtgatctttctatattattcccatcaattcattctgtcatcaaaatttatgtccatttatttttggtgcagggttatattgtcctaaatagaccatgggcttttgttcagtggctggagaaagcagatattgaggaagagtaagtgtcttaattctggttttctacaatttttatgctctccaataatgaaatctaagaggcagcacattttatgattggtgcagatatattctgatggcagaacctgaccacatatttgtaaatcctttgcctaatttggctcatggaaccctgcccgcagcatttccatttttctatataaaaccatttgagaatgaaaaaataatcaggaaattctatcctgaggaaaagggtcctgttactgatgttgatccaattggcaattctcctgtaatcattaagaaggcaagtctcaatagtttgcctactgtgcttgattgattatagttgttatactgtgacccatatagctgtaatggttactattacaactattatcagattttcgtgattttttcccataagcaacatattctttcatttaaggcattgaattttttttatcatcagtctttgatggaggaaatagctcccacatgggtaaatatttcattgagaatgaaagatgatccagagactgataaagcttttggatgggtgcttgaaatgtgagtattaccatagaaattcaagattcgggggcttcattttttattgtatttactgatattctttttcattttataatttttcctggaccttggtctgtactaataggtctaaccttctgctgctttgattgtctgttgagtaaaggtatgcttatgctgtggcatctgcattgcatggtgtaaagcataatcttcgaaaagactttatgcttcaggtatgaattgcttgtgttgttttgtaattgttacttaaggaattcatacacaagtccatgacatgcatcattggaatgtttcagccaccttgggatttaaatgttgagaataagtttatcatccactatacatatggatgtgactataatatgaaggtgagtacattctccttaatgcaagaatgatgtgaaaatcaggtagagaaactctatttctgtggttagtattacttttgcagtttagcttatgtctgtccatgtataaaatgtgagtcttgcatgcttagttgttgtatgcgtaagttatctactccttattacttcatccagggggagctgacatatgggaagattggagaatggcgttttgacaagagatcttatcttttgggtcctccacccaaaaacctccctttaccgcctccaggagttcctgaaagcgtggtaagtccatgcttcaaattttctgggtgtcttgctttgaaattattaatcagttgatgttggaaagttgcaatttcccaaacagtctatattagaaaatgtccttcttaacactgattgaccaatcctcttttctcatgtcatttgtgtttttaaatactccaaaaggaggagttttggtgcactctacttatctttcacacttgcctttctatttcagtctccatcattttaactttttgctttgctttattcacccataatttgataaaaatttcttctcattatatctgaatttaaattttagaatgttgattttgcatgttaatttagtaaagaattttacgatggttcatctttctgacagatggctatataaagaaaaggttcattatatgtagctttagtttgtggcaacaattgcaaaggtagtaaaaccgatatattgaagtgcatgccattgccccctgcttccttatggaccatatcattctaacttttgcacgcaaagtgcttcaaataattaaatttacttcagcaaattaccactgcaaaaccgaatcaaacacataggatgcaaatatatacacaggaaatcaactgagtattttcggtagggaatctattttttgatgaggatgaatcatgattgataatgtggctgtttctccaaaattttacttgtgaagatctatgcaatagctgcaattttgttgttgcttttgtcgagtttttttttttttttttttgttgcctatgcccattgatgtcatgttatgccattagtacaagccacaaggtattagaattatccttgtttttgtggcatctattatagcatttggtggaccactggacctcaatggctgagcccaatggaaaatcaattgaatgggaaagattggttgtaagtgttcggtggggttttaatgtgattttacagtctttgctaaaccttcatactagaggtgttttaactgaagcttcattgatgccattttgtgcttcttcaatgattgctagtttttgtcaattaatagatactgcaataatcattttcaggtgcggcttgtaaaaatggtcaatgaggctactgcaaacatacctgaatgggattcattaaataaaagctgagggaaagatgataaaccataaagccagtgattttgagatgaggactacaaatacatgtcaaaatagataagtttaagcaaataggaattgtgataaatacaaatgatattttgtgctttctctgaaaatagtttttattttttctttctttttaatggccagtaaattcttttgcaaactgattgttgtcatagtgcaaccaatggaatgacatcttatccgttttgttttcccccagcttttgtggatgaaactagtatttgcctctcctcactaatgtttctctactagttaaaagcaccaatatttgcataaacccttcaactgcataggcggtttagtaataaataaataaaaggataaggaaaaaagaagtgtgactttaatggaaggcgtttgtaccattatggtgaggtacaagcaagatactaaaaaagtatgagactaatgtaatttatttatgacaaatttagaataaaagttttaatattttgttgtaaacggaaaacatcagttgatataaaaaaattaaatgtgaaaacttcattcattttggaatggagggagaattcgtaatcaatttttttcatgtaaatttgttttggataagtgataatcatgtacctcaaataggattaatctttgattcattggattgaggaatattcatgatttttgatttaggacaaaaaaaataaaaaataaaaatggataaagtaaattattttgaaatcagataaatatttattatttagtttttctaatttgtgcaacattgtattgttgcacacaataataataattaatgacttaattttatcaaatttagattaatatttattactaatgattctttcaaattaatttcttatttagattcatagatttacttctaatcaaaataataaatatctcaatttattaaatagattcattttatatagtatttttgtcttaaaaaataaaaataatatttaaacgtcataatgatattcatcattttttgatttcctataatattttttctttcaaaataatatatcttttctctcccttcagaaaacaataataattacacattctattttctattttatgtgtctcgtttttattgtcttgcatgatataagttggaaatagtagatacacaaatatggtattgttatttttatttcttttaaaataaatgaaaatttgctgaccagagagttgtccaagattggtgaatatgagtttttttttgtgattgttcaccttcgtcctagaatacaaattatatttgatttctttatagatactataggaaaaaaatagagaaaaaaatgaattagttttaacttgtgtacctgacttttctagaaggtacctcatctgacttctccaaaagtttataagttattttaacttataaaaaagctcaatttgttttaccttcattttttttcctttttttatcccttttttatcggcaaaattatatctaaaaaggttgggcataagtgttattggataagtttatctaaaaagagtcttaattttatataattagaaaagttatgccatcataatttgatcacaacttaaagtagtaagtagttgcttgttgtctgtaaaataggtaaaatcggttatataatgtaggtagagataggtcatcttgcatatttagggttgttggttatggtatcaaaaaatatttacttgcttgaaagcatcactgtctcttgggtgactcccaattccaacccaataccatctaccctttttaatatatgtcttccggaaagataatatctttaatgcaattactttggcagttgttggctcaaagtagacctggtacgcttcgacatgatgaaattccaaacgcaatgtctgatgatctcagaggatgaacaagctaagctactaccattcccaacccctctcaggaagagaagacagacagtttctcacgagtttaaatattcattgtatgttgttcatattaggataaatgagtctaactctttccatccaccttctgttatttcttgttaaactagacaaacagtaacacaaaggaattgcatttaagtaactgctgcatgctacttctgaacaacaaaagcaataaatcacagcagcaggaaataaagagagacagttaaatccctactttagataaatatatttcctatgtagaccaagacatatccacaatccaccatccaacaaggattacttattcataagttagagtaaaacccgactaggtaaaagggagaaagtaaaccgtatgtatatcgctggttatataaacacataagaatcttaacaaagatgcgaccactagacacttgtgcttactctgttactcaagcatgcttcacaaagtcattatcctatcccattatccaacttaaacgagcgcttcatacctaccaatcttcccaactagtctgaagctttgaggtagtaaaaaaaggggctagcatcatgtatcaccggcatagatgacggtaacaattcttacaggcgcatggcaaaccattatgacatttccactggagaagtgaacaaaccatagtcataccaccaatcttagaagatacatacaagctccaagatgactagattttatttatcaccctctatccaccctaaagatgtttgtttatcttcaatcacccggacttgagagctcagcaaattctacaataatatacaagcaaattatgtaagagtaagttcagcagttaacacataatgaccgatcaacagttcagaagatacagatatgaatcctagtacttcccaacactgtttatgaagatggtaatagaggaagtggatacgtgtggcacacaaattgtccaaatttcaatttttgcgagttttaaacataaatgagtaaaataataatttggtacccacctttttgtagtagcaacctcctgcaacatgtctaggccagataaactccaacaaaattcaatgacaaggcagtagaattggagtttgaaggggtagttgtaataatccttcaaggacctcaaatatgtaattatgttagcaatccaaaaaattaacaaaatgaaaggcataaacaaacagcaatataataggggtgttcacatactgaaatggatcagttttgaagagaaatattatctagtccagttacttcagttttcttaatttatcattcaattagattggtttaaaatttaaattcaaccaaatgattccaatccaatctataaagcagtttgaatcgaatcagctttcattttttaaatagtaacacataataaatataataaaaaataatttaaaatatcaaatatctcatctataagtcaatatatagctaatagtagtataactcttcaaatatatactattaaaaataaatttacacagcttaataattatatttagatacctttgctcaattatgtgataatttttacaaaaaatataagaaatgaaaatgtaactatgagtgatatcataaattttaaaataatatatgtgtgtgtgtataatttcagtttgaattgagtaagttttcaaaatcaaatctgaaatataatcagcagtttattaatacccctaccaataaatccagatgggaagcataccatcaatattctcatactgacaagcagcatcacacaaagtattgacctgtccagattgactgtccttgaaattgatcaggcagtggagtaaaatgctgatttccatttgggagcaactgtgactgcaactgctgattatggtgtgcttttaaaagctccaaagtctgaaaatcttgccaaccattctgtttctccacctgcagtgtagatggaatttgttttccaggcaagggaaaactggctgtcccactcaaaccactgttaccaacttgatgagaatttgactgagagtaagtaagaggaccattagggcctaaaccattggttgatgcaggcaactgatataccatccaaccaactgtaatcatccataattggattcccactaatcgaatctgaaacagtgggttcactacattgtttaggaggaacatgactgaaaccaggaggaggaccaaggtgcctagaaggtcggctgactggagattttttaaaaccagcttgcaaggttgatgatgttttcacaacagagttatcagtgaatgttccagaagatgcaatggcctcaattttggatgatattgcaaagtcttcagcttttgagagatcatgaggataaaacatactagttctagcacttacagattgctgggtaggaactgcaagtgcagcatagtcagagattgtcgcagctgctttaaatggtaagtcaggtttcatcacatgcccattctccaagaatctaagacctttcaaactgttagcaagagatatttcctcctctaaccaccaccttgaagaatgtggctgaactagttgcaggtgttgaggcaccatagcactaacagaagcaggtaaagaaatttgatgattcacatcattcagagggttagaagtagaattaaagttaaattttatatccccaatagaagccattggagctggttctaagccttcatgtggtgcccgtgatgaggaaacaaccacatcagcttgtttatcagctactataggtttgaaaacaataacctcgtcatcctcctctccttcaatgtactgatggtggtctggactaccaatttcgacttttgtcttgtctattactgtgttgtctttcaataaatcttctgcattaggcatacctgaataggaggaaatcacaaaatcatctgagatttgaggctgaactccaattacaaatttatttcccttttgagtcaaaatatatcattttctgatcaatcctaacaacattggctaaagcctttcctgctgctaaaatccttttgacccgaccttttctttccttttcactgtcacttccaatggaattcttccttgaaaaatccaagatggtttgtgcagggagaagtggaccaaatcctcttaactcaaaatcctcccacagagcaagccggttttcagtttccccttcttcatacctgctcatgttattaaagcaagtctcctcttcattttcaatagacatggaccaaactgaaagtagcttgttcaagaaggatacacaatgattccaaaattttgatctaacagttgcctgattctcatctacatcattgcctgcagcatgatatggataacatgccaaccactcaacaaaaaccaaaatgcctggtaagagataactacaagaaggatcccacagctgcatacatctctctactactaaactcatcaattcgaaagctgcggtgaatgcattctgaagtagaacagcacgctgtacaatttctgcatatgtttgaccttcagattccttattcacattatgaactgtaaatatgatagtggaaacaactctgacaatggccagtttgttctcaagagtatctgtgccaaaattcagctcttcgtcttgccctgatgatagaagctcacgcaggccagcgctaacaagagagagaacttcagtgagggtctcaaggctatcatcacaatatatgagaaacaaagaaaaggaaaaaagtcagaatgtaataatccttaataattttatgcatatgatggtcagatagaatttgtgcattaatatataccttgtatgagtgaataagattccatttagacggacaaggcgcgtgcagaaggatttgtaagtgtcctgtatattggataatcctccctttctacaagacgtttccacaccagtatccctggtcatgagttttgcttccccttttcctcttccattgactgcaagagcgttaacatcaccagaaagctgggagtaactttggtgattctatcatggtattataaaatagatagttagaagtaatgccaaaaagatcatatatatgacaaaaggggaagagtcaacaacacataccacagtatgaaaataaacagaggatcaagctcaagagctaattcttgacccccaaccatgccaaataaacagaactcctttatgtgaaaaggtatgctgggttgcagttttcaataatatcaaatataattgcatacttataatgccatacacaaactccaccttacacgtcccaatgcttgaataacttgcaagccactgagaaatttaaaacttataaacttccaatgcatttacctttgagtaccaaacactacaagtagcagaaaagactgaacttgatacatcatacttaagtttgcgagtaagcaaaaacacataaaaaaacaaaaacaagatacatctcaaacaattgagacttctaaatgaaaaaaaatgcaaaactatcaaattatccctggcagttgtaaatggactatccacagccaaactcttaaaataacaataaacagctgccagttcatacccatgttcatattaccttctcaaatgcaactatcaaattatccctggcagttgtaaatggactatccacagccaaactccgaaaataacaataaatagctgccagctcatccccagaatatgaagccaacaaagcaagctgaaaataacagacttgtcaaaatggaatacagtagctacaaaccatgatcaacaacaaatgtgaacaaccaaaagcaaagcacatgagagacaggaatgccaaaaacctgatgatggggatttccacttgaaggccaaatagctgcagcttgtaaatagtaactagaagctgctgcaaactcacgctttatcgagtcaccttcaccatataagcctttgtagcgtgcaagatcacccaagtatatcaaacactgatgacaagaaattaaacctttcttcatctcagaagatttttttccatccttctctgtgacaattttattctccgagtcctcaaagtaaccaagtggaagcccatactttgctctgattttcataatcagatcatggtaaaatccagttgcttctgaaaggaaagtcttaaactgcagccttattttagttatccggtcaggtcgaacaggacctttccctccctgagatgattttgagcttacagaagcatgagcagcattaaagtatgccctcaattcctcaatccgcttataatgcaattgccacagagcatactcaatattgtactgctcagaaaaagcatgatcctcaagaattattgcttcataattctcacgaatctgctgccaagcatttggatcagatgggacctgtgcctgagcagatctccttcgcttattctccaattcaaggttctaagagagaaaaatattgagattaaaaatatatcttttgtattcattccacagaaggtactaataacaaggtccagcaataattccaaacaatgtcatagtaaagagagcaaacccaaccctgcaaagtggggttatcttcccaatagaggaagaagaataacaccaattaatcaaacccaaacctctaaagtctaaaaggatcaatgaacaccaaaaaatgtcctccaaagtgaaacttctatatgcagatacactgtaccaagagtacaattgagctaattaagattaaccagattcctttacatttggcagattacgagagattcacatggataagctcttttccagtaataacatccgtgataattatgacacagagagagagagagagaggtgtacctcctcataaaggcgttgtgcacgctcccgtgaggaaggagcagacactttatccatctctaccatagggactaaactctagctacataaaacctaaaaacaaaaaatgaaacaaaatagctcagttcacaatagctcagttcaaagagtcaggttttaagtaactgagataaaaagtagagtaaattacacccgcaacccttgtgtttttctcaaattgcaccagacacccctccctttttatacattacttttacccccttctattaacgtcgttaaataacgtcgattgaaacatctaagaagacgaaattgcccgttgagtaaattacacttgcgtcccctatgtttttttcaaattacattcgatacccctccctttttatacattacttttaccccttctgttaacgctgttaactaacgtcaatgtctagggaaccagacccagcggtgatggtggccgtagttacggcggaggacgaggaggtggatatggcagtgactacggtggtagtggttgctctagcgggagtgggtgcgcccggacgccgtattggtgggcgaggatgacaatgaggagaaagagatgatgatgccgtgggagagggaggaggaggagaaggaggtggtggtggtaagtgaagaggagtcgttgaagaagaggagggtttgtaaaactcaagatgtgattttgaggaagaagatgagggtattttaaacattatttttcgttaaaagtcgggtgactatcatgtgtctattttctgttaaattattaaacaatgtttaggagggaaggagtttgggtgtaatgtgacctaaacaattaaggatgtttttgtaagatgtaaaaaatgagggttatcaagtgcaattaggaaaaaaaaaaacagtgcgagtgtaatttactttaataagtaacatggctgttgtggcaccaaaatgcgtcacattatacaaagtacccattaaaattgaaattcaaagctataattcaataaaacaagagttattccaatttgacccccttaatgagggattaacaactaagtgataaaaaattcaaaataaagcttgggtgaaaactctacttaatcacatacgattccaaacatcaagttgaacatttgagctctgaacacacacaatcagagtcgaaaagcaaaattaaatgtaccaaatgattcaattccaaaaacaactttccatcagtttcccactgataaagcagttgcatggaattcgatataggaagaaacaacaccagatccatgaaattgaattcaataacgatacaatatgtttaagcgaataagcaacacaataacaataaaggatgagcgcattgaaaaaacgggagaggaaggtttgatcgctcaataaaagaattggaaaagggaaaatcacctgtgaaagaggatagaagaatcgatcaaaggggaagtgttggtctttggtagggtttggttgtgttttatgagagagagagagagaagaagaagaagaagaaggaaggaggagggaggcgtggaagtggttgtgttgttgtgttggatggtcgtaaagggataacgcgtctttctctgtttccatgcagaagacaaatcactaacgacgtcgtttagacctccgtttttcaactttgccctcacccttatcttttttttcttattagatgaacgtattatatattactagtagtgtttgtttagtcattgtataatcaattttattatttttttttgagagagaaatatcggatgttcaaaaatcatgagattaattgtgcagacagagaaattattgaaaagtgggttatattttttctaaaaaaatattttccaggtacacgtccaatagtaaattaaattcatatttaaagaagtcagttatttatcaattatgttggactttatgggtattaatttttttataaaaaaatatttacatcacattattaaaataaatactaattaacatataaattgtaaggaaaaatatttataaatgaattaaaattataaaattacttatatttcactatattttttatataaaaaaaaattgtttgtgtagagtatttaacttagttgattagttgattaaatagtatgcacaaattgttataaatttataatatatgagtttataaaaaatgtttgttaatgtaatgtaatgcaacatataatttatttttgacaaaagaaagacactattgtgacttttttttttttgtcaaatgaaatttaagaaaataaggtataggaagttcacaaggcacaccatatttctaataccttcaaatactattgtaattttaaatactggtggtttatttcttttatgatttttctaattttgcaaagttttgtatatatattttattaaagtttctttttagtatacataaaatagaagaaaactgttaagtagtaaaagttgttattaaaagtttcttcacgtttttagtctcgagtctaaattgagacactcttgcctcaatggtgtaacacttagggattgttagtgccccttaccaatattctcaaattccaaaaatatcatttctcacaattgtgattttttttaaaaattttttacacttctactagtttagcattaattaagaaaatacaacgaaagtataactttcgttatacattatataatacaatcaaattttcgttgtacattattttttctgaaaaaaagcacaataaaagtataatttagatatataaattattacacaatgaaatcatactttccattgtgtatcaatttatataacacaacaaaatcataatttgtttaggaaagaaacattcatgctatgggctaaaagcaattttggagggctgatatcaattcctaacaatattgatatgttaggccgagattttgaactttcaaaacccgtagatggttagattaacaatgggccgagttttgacgatttctattatcaatgcatttttttgtatttttactttatttttctgaccaaaataatattttgcatttgagaattgagaatctttcttattcaacaccaccacggaccaccacttccggcgaccatttccaactaattccggcgacgccacgctcccgacaccggtgacctctctacctctcaccgaacgagtgaacgtgcatcttaattttttttttttttctgtttatgattatggatcgatttgtttctgttactgaaaccaaagatgtgggatcccaccgcttcacttcagttctctttcactacgctttcatttttcaaatcccgaacgttctctttctctgaatcgctcggttcaaattcacattcaatttcgaaggattttcttcaccagaattcatagcagtagcatgcactacgtaacttcgttttcatcggaggtgtcactgaagtagaggcgttgaatattttctcaatcgttgttaaaatgcttagccaccgaggaggataattgttaattgcgctgccaatccgtgttctcaatcgttattctacggaaatttgattattcaaaattcgagaaagctcgaaaatatttatgtagaagtaaaagtggctatatgactagtatctgagcaaatttctttttgcgtttagtaattttagctttctaattgttattattattattattattattattattattattattattattattattattattattattattattattattattattattattattattattatttatttgcatctgttttccatttttttaatgtgattttaaccgtaccttatgcaacacttgtagccaatattgaatgtatgtgatgctttagtttaattttgaatagcttaatagatctagtgcttagtactgtattagtttttgtggagactttaattctggtttctatggcttgggttttgatcctgtaagtattattggggtaggttaaggtgtgagtgtgagtaaagggtgtagcgaaatagccttcaatattttagccctggattaggtattgactatttggtaattagaatgctatacttgaaatgtttgcagataaaatttatgtttggtcttcatttctttcttgacttgcgttttgcctttaggctaaatgagtggaaaatgtgcaatttagttaaagaaaatgttggttatcacttgttaatgcatagtggggttccaaaatttggaaaaaatcaagactattcttgcataatttattgattagagaagaatgttgttggtatcagttgttcaagttgactaactgatgtgggctttcagaatgactcgaaattttggtttgacagttgtacattgtacgcacatcttcttcatggatcattgtagttgcccttctattacacagttatacttgaattgctataacagtaaaacatcaaattgctttgctactattttaaacttttgttacttatactgttgcctgtgcttttctctgaacacaagcaactttatatccgagaactatttcgattgaaaaactgatattttatgggcggttaaattaaagtttagcacatgctttgttctgtgaacattgcagttggttgtcgcaggattttttctttgattaagatttcccatggtggtagtgttgcaatatagccttagcctataaattaaactgtccataaagaatatgattccactcatttattaaccgagtttggttatttaattgtgtttcagcaagggcaaggtgcttgaacatctgaattgtttgcaaaatggtttcctttgagatgaatgatcgaaagagtaagtgttatataatatttttgttcttatatcaagaaaatgatattatatgaagtgatctgttgtctttaatgcttatgtgtgagaataaattattggggtgttagctataattccataaacatattagacagggtagccatttttataatttaatgttaattacccaattctcttgtcaaagggcgagccctgacacagcggtaaagttgtgtcttggtgacttgttggtcatgagttcgaatccgaaaacagcctctttgcatatgcaaggggtaaggctgcgtacaatatcccttccccttacctgcgcatagcgtagagcctccgggcaatggggtacgtagttttttacccaattctcttgtcaaaagtaatatgattgtaattttataggaatattttttttcttaaaattggttatttaaaagtaatgacatcacctaatgatgctaattgaaatcttccaataatggcattgcttatcacattgtaagtaatggtattccaatccatcatgctgattttcttcagggtcttgggggaaagacatctttaagatgtatgttattagtttgcctagtaataatattaatagagttttcaagaaacatattagtgtctttatgttgtggtatcatacttgctggcataaggattgatttgaccaaactgtactatttttctacattacgttttttatatctactacaattttgttattgctatatttaatgtatttgattggcacatgatacagagattggattaggattaactggctttggtatatttttttcattccttggaattatcttcttcttcgacaagggattgctagccatgggaaatgtaagatttgtctacgagttacttgttatagaagtttcttctcatttaatttacttaatacatctttttttacaccttgttatctgcatgattagatcctgtttgtttctggagtgtccataaccattgggctaaaatccactatgcaattcttcatgaaacgaagtaatttcaaggtaaacttgttacatgtcttttcacttggtgcatcatgctttcttcatggtaaattttccctgctcaccttttactcttcttaaagggaacaatctcatttggtgtcgggttctttattctcatcatgggatggcctatattgggcatgattgttgaggcttacggattcatcgtactattcaggtttggtgcaatttgaaagaaatctgttgtgtttgagtatgtctgtatgcttaaagctaattgtggattatactgtgcagtggtttctggcctacactggctgttttcttacagaagattcctgttcttggttggttgtttcaacaaccatttgttcgatcggtatgtatttgtgatgaatggaaatgcgttaacctgtcatctaagtcttcacaaaagtatcttacacatttaccagtctcggtgctaccttatcaataattggtgttcatgaaagttatcaagaaatctttactcactttgattgattggagaatattgattttcattaatagatgtgaatgatagtgagatattgggtatagaggaaaagcaacagtgtttagtgaatgtcaaactaaagtcttctgatgctgaatttagaaaaaagagctttaagtttaggcctaaaaacattttcactttttcaatgaggctacgatgaactacaaatgaagccatacagtcctctgaattttttggggggtggaggtggctgatccatttttgcatgtatttttttataaaactttcatcattgtgttcatttttttaacataatcctggtgggtcttgatgaggaatctgacattaattgttggttctatatatctgtctagagattgttgagtgatacttcttctgtgtaaatgaaattgtccaactgagctttgctaattttctgtgtttttgcagttgtttgaccgctatagaggcaagcgaatgcctgtgtaacacaagaatctatgaaaacatcatgtaactagtagtgactgcatttgtaagtcaatgtaaagaaaatactcgtatggatatctaactgatttgagtttgctttttgatggtagaaaatggttatcattttatcatggtagtcatttaatggaaagaaatttgcaaagggaaaaggtttcagttttcactttacttcttgtttggctcctaatgattctaatgcttggtggaaatggggagtggttagttccatctacgtgactattccaatcagacacctttgggagttgtccccaccaagtatcatggtggcttttgttcaaacccgtaaaagaagtataatggttacattacttgatgtcattgcagcaatatagttagaactctgcagtgtaatttactctaaatattttacatttactcccatgtcttctattgtttctttggaattgcgtatgttttctttttaggctgagttgtgttattcatataacaactcatatttatacaacattttatttatgtctctctctattatggtcaattcttcaagtctatacaaatggtgatcttgagtggtttcagaaaactcttttggtaatataaattatccttcgcattacctctaaaccaatttgtttatcgttgaaaaagtttaaagttttgtgaacactgatgtgttcattaacactagagacaaagaaattaaagagaaatgtgataaatataataagagatataatgtaataaaaagaaagagatgttggatgttaaatgtatgtttgtaataaaagtgtatgtatcattaattttgaagaaatatgatgttaaaagtattttcttattggttgaatactatagttatatattgttaaaacaagaaatacatcaggattaatctattgaacatttgaatacacttaaataataatagtaaattttaataattatccactaatagtaataatataaaatagttttatattattatttaattataaatcaccggtgttaactctaaggtaactgataccaaagtcaataatctgtcaataatatagcattttttttatctcaataataatataacatgtaaagaaatatcataaatacaatcagaagtaagcaaaaacatcaaactgtttgagaaaaattgaaccaagccacatttaaaaaacagttggattcaaacaaaaccattttcataaagtggttcatatcaaatttttttaaaaaaacctatacatgtgtgaaataaataactgaactagaccaaattgtactgttctatttgaatattaattgctgcattggtttcaacgacaaaagagcaaccattttacaaatacttaagggtaaatattaatatttttttaaaggccagtattaattgttaattttttattttttgttagcaagaaaaattcaaacctacaacatctccctcttctcttctcccactaaatcaactttatatctcccaataaatacaaattgttaaccatgcctatcttaaaaacgaattcaataaaataaaacgaacaagactcgcctaacatgctaagttttccatgctttagagatgattttaggaaagtcagaatacgcaggagtaaaaagctgagcgttatactaaagaaataatttaatagcatcacaaacaaccagctagatacataacaataacatacataccaatcattccacataggtgacataaactggcaattgcatgtccctatgtacaaagaatttgccaaaacggtaattaaaatttcttcactttagctgtttgttcaacaaaattccccatctattgacatgccatataattacaccaaattccaccccctcccctaaagaaacaaaagaactcaatgttattaaaaaaagagaaaacctgaagaccaaaaggaaagcctttcatttcaacttcaatgaacttcactaccaaaagaagaaattaaataggaaccaagagaatgaagcagtacacagacccatgaaggataaaaatatatgcaataagtcagactcaaaggatatacaacatgtcagccaaaattcttccccacggattttatgaagcacctattatttggccagtcaactccacgacggcgaagacggtttatagacaaagtcttgggaagtcgtagaaccataattcaaatcaaggttatggagctgttccatcaactgggatcgccgttccttgaaaaagtcaagacgagtagttaactctactagtgttgaagatgctacagatggatgtcttgcatattcccccacctgaaaccattgcaactaggttagttccaaattatttggaagcagataaagatgctgcaaaaatgtattagcaaagtaattatgatactcatctgacaatgaaaaaaagttgttactagaattatgcataattccaagaaacatttctttaacttaattcttacctctgctgctcttgaggtggagggcacagaagccgaatcaacggcaccgagatcatcgacagacatgcttgttgatgcctcagtacttttggaatcgctaggacttgactctaaaaattgctttcgagaaggctgtctagtaccattaccagatgccaatacttgtcctttgatatttctccaatcagtgcccaacaaactctcctgcatatatgaaaaggcaaccttgttgaagaggctccaaagtccaaaccataaaagaagatatcatccataagtaatgaactaattttatcataaaaaaaaactaataaaaaatgatagatccctaaattagagaggaaagtgctgcaaccagtgacaattttggatcagaagcattttggattctaataccctaaagaaatgaatccagtaataaaattcctgatttgtgccaccattctatatcatttttcatggtcatgatgagaataagttttacaataaaagcaaagaaaagaacttgacatgtttctcgattagaggttaattatggaactaacttgtgtgtaataatgtatcaactcatgtaattatttaatactaacagaaggagttgaaaggattggactaacatagggaagattcaaccatcttcctgattgtttttccttttagttttgattttgagaaatagactataagacatacctcagtcctttgtttcctctcgtgattaacaaaggccagggttgaatcaaaatcttgctgaagaaacctcctgcacaagtcaaaaagacttaaataactactaaaggagttaaaaggttcacatggctttcaattaaaaactggtcccataaactttaaagaaatgcagcaacaaactagtgtttgagtctggaaaaggcaaattattgttaaaactttaaaatgattaccatagaatgaatacaaacacacatgcagaggatacagtcatacaaaccaccctttattatggatacaaggaaaaagagaaaattggaaatattacaacatttcatctcctttttttaggaaaatttctctaactccaatattttgtgtgtcaactttagtgggtacttatccatttgaagttggaatatgtcagtagaccctttgctagttaaattggatttggtgtcaaattcatgtggaactagcaccaatttgaattttgaagtacatcaaaagctgtaatagttaatacttaaattttcatatgtagattccttctctttcttattattacaaatatcataggtctgcatactcactgttgaggatgattttgggcatgttggtatcgatcacccacatcagtaagtgaaccatagtgatgctgtcgttgctgattaagttgatgatggagttctgcaaccttctgcttcaaccgggccacatcagcttcagcaagtgcaatctcctccagctcagcctttgtctgtacaatagcagattttttacagaatgtgtactgagaaagccatcaaaagggaaaacgaatattaaaatttacaaaaatatcaaatcaccttggaatccatgccacgtgaactggaaagctgtcctgaagacatgctcaagcctacttccaatgcagctctaagatccctctcagcttgcaactgttcttgcaatcttgaaacctgtagattaaaaaatcagttgcatcttattatgggatcaaaattataatgaggggatttatatccatttgaatttaaaaaagaaaataaagaaaatatgagggataaaagacttttacatatttactttcaaaagaaacaataaccatcaaacaggacacatactattgaacgaaaagaaagatatggcacaatttttggccctagtgattataaaatcctgagcttcagtcagcagaagtataccttcaaaagagctttaaaatgccattcagaatataaaagaaaaaacatttttccaatatggaaaacccttccagcaagtaacactttaaattatattttttgataaacctccattagtgtagaatgcattttatccatatcataaatcaatgtaaagcggttccattattaacaaccacatcttgcataagttgtagtaatacacaaggaaaattcattagaaaccatttttggtttctgcaagaatattttaatcaatttaaattcaagggtgaaatcaatttaaagaaaaaaaacagcaaaaatgatgtcaggaatgtcaaacccaagaatgtccagaaaatgaaatcacatgccacattaaaaacaagcagcaaagcacagggcaaaccagcaaattaaatttaaacagttacaattcatattggagggagatatatcaatatgtacatcttgttcaagtgccaagcgccgctcatgtaaagcttgcttccttctctctaagcttgcttgtaaaattgcattgcctctagcctaaaatgaaaataagaccaattccattaaaaaaaattattcgttatatgattcagcataaaaataagtaggcataagaaatccacctcctttgcaattctgtgttgcaaatcactttttgcaatctctagtctctgaatagcaagcctacaggcatcaaaagtattagttatttgttttcaaggtataaaattgaaagaagaaaaaaaggtgaaaaaaggaagacaggtataaagcaaatcacgtaatgcaaggagataacaaaacatagctgttacagctgatgaaaaaagccaagctagagaacctaacaccacctatccaaaaaatctataagaagacattgaagaataacttggaattctatcaagaatcacaatccaagagcacattatacaaagaaaaaagtacaaagctaagtatcttactcctcttctccagaagaatcaacggattccactgatggtgtcttccttggctgcttaaatcaaaacaaattatcagatgccatgtatttaccttgaaaattcaaaactacaatagaaaatatcagttttgcttcacataacataatttaagtatatccactgctagcatattaactctgcatcagttttgcctcacataacataatttaagtatatccactgctagcatattaagtctgcatattttaatggcagcttattgcaaatatattgtcagtaactcagtatcacataaatgtatgattgtcctataaatggttgttagtgtaattgtgattcctgtaacaactcacattctatattcacactgagtttagatatcctacaaagttgttaggctgtaaatggtcaaaaaataacaactcacattgctccttccccagaatgccgaccgcttagaactgaaactagcgctactagctttacttgtttgctttccagaacctgattccatcactggcatgggcaaaaggttgccggggtccatagaagataaaatctcacccatggatcgataagattcagttgaaggcaacaaatttgaagcatcattctcatcaactggattttcactgccctttctttgcttgttttgatcctcagacagtggtggggtatctgaaacagcattcagattagcattttcagtcttagcatggttactactggaggatccaacatctgaatcatcacctccaaatgcctgcaggaccacaaagaagagtttaagaggatagagagaaaagaaaataacattgctactcatggcaagagcttaatcaatataaatctctataacagagaaaataacattgcaggagataaccttgtaatcataaagatcactgccagcataaccactactctcactcaattttccactctgaatacgatcagcatcatcatctgtctcctgatcaacttcattctccgcatcatggtaaccattttctttcacatctatattatcatcatcagtagaatcttcactcccactgttttcaacctgagaatctgctgacatggaacatctctgtatattttcttcctgaaacagcagataaaaactaaggttgtagaattgaatcaaggaaagaaaatatacatttttggaagtgcaaaatttagcaaacactgccaactgaccacgggtaaatcattagtcacatgaattgacattcaattttagttgcattataggaacaatgtatgctacaagaggtcaaacctttttagctcattatacaatctacggattgaaatttatagcaacagttaacttgatgaacaagtcccgtagcaaaacttcatagtaagtttgcatcttcggtacaagcaaaagaatcccatataaggaccaaaaaaagggtgagcccaagagtaatcaggatacctcaggctaaacaaaacataaatgaaggttatgcagcaacttgaagttaattttcctaattgtaatcatacacaaaccagaaagcaaataatcaaaagaatacaaattgattgagagtttcttacatcaaatatattctcatactcctctaacaaagttgtaataactgcttgagcattattagcagcattagcagcagcaagaagctgggccgaactatcaccactggcatcaaattcatcctccagttcacattctccagctagcagaggccgtaagagcaagggtgccatgcaagcagcaacagcagatggagtcattctattctcctgagaatgagaaccaattgtatgcatcatcttcagaattctgcaaaggtagagataacaattaaattatggtgaaaaaattaagggtatttgtttttgtcattttaagattatacaagtgcatttctcagattaagcaggctacaaatttaaggtattattattacatatcaacataataataactgcaacaggttattcctcatcaccagatattatcaacaacaataaagccttatctcactaggtgaggtcggctacatggatcacacaacgccattcggcacagttaaaaaccaaagtttcagaaatattattaagtctgagatctcccttgatgatttcttccaacgtccattttggtttccctcttctccttttcctgggctaaaaaatcatgcaatctactctgctaattggcgcttcttgtggccttctttgtacatgccgaaaccaccttaaccgattttgtcatcttttcctcaatgggtgttacaccaatcttctatcatatcaccagatattatcataggttacaaatatcttagggtaagatagtgaaaacttcattgaattgtagtttttagaggcttttttcttaaagccacataaacctgaacaaaactccaaaaacataaaggttctaacttaaaatgaaaccaaacagaaatcaagaaaacccaatatacattctcttcaagtgcaatttttaattattctaccataattattccatagcaaactcaaatacaagaacaagatacaacaaatggaaagaatagtgtgtgtgtgtgtgtcattgccaaggcagcggggaggagagagagagagagagagagagagatagagagagcacctctgtaacaaacgtcgatttggctctggaaaagtctccaatatagcacagcgcattgcattaatcctagcttccttgcgatcaatttcttgtaaaataaaaacagtaacaattaactcaagcatatattcacatccagagaacaagataaaagcaacaaaattcaacaactgaacaatttgtgatggaaagtacataagcattagacatatcaacataagcaaatttacacatccaagataagaagcaaataaagttaaaatgagggggaaaaaataggtgagatttaaataggacagtcaatgatagtaactgacatcaaacacaaatttaaagtagcttttaagccacataaaaaagtgggccaaacatagctgaactcatccacacgtttcaatatttcacagcaaattttcaacattaacagcttttttaaaaaaagaaaaaggataagttgttatattttccaaaggtcaaacatattccataaaaaaatagaaggaaaaaaaagcaaaataaatagagcaattagcagcatttcaaaagaacaaaactaaaccacctattcagagcatatagtcataaagaaattaaacatagagctcaacttactataagcctccaacaaagcagtgcagcatgaagctggaactggagaagagggcagctcccttagaacatgctgtaaatatacccagtggattgtcattaattaaaatgcataatccaacaaaacattttaaaaatccaggatccgtattaattagattgattttaccaaaataatagctgctccaattcaggttctattaatcttttatgctgatggaagaatgcatgattgattacaggtcatggcctcaaggtcttaattgtaagcacagaaaaactattaaaaaagcctggtgctcttatattaataaattttacgaagtacaccagatttcatttagattgtacaggcttttagactagaagctaataggtgatactgatgagtacttgaataaaaggggggtttgctactgccggtaatgatatgtaaaacaaaaaattgcggctgcaatgtttctttcagaagcacacaacagctttataaatggtcctccagcaattcgttagtgtgatctttaatagctattatgactgatatctaatatgtaagtagggtcggtggttttaagactggttgcatgaacatgatggtttggcactagaaatcttcccaaaatttaactcatttttatgcctttcttcccagatcagcattcagtctctttcagaatttttacctagtagacaatagacatgcagagcaatggagctcttttacactaataattaatgtgattgtcagtttttgatttaatgtttttgttctgcgctcaattgcttctatgtttaaggaggatttcttatcctatttcttgtgtagtccttctttaaaataaacagaaaaagtttctggaaagcttaaactttactttacgtaaaattgagatcaataattctctgtacccactgttgaatgatgtgtaggttagatactaccatatttcctacttcctagtgtttgtaggcatgacaaatattagatagaggattttcttctccatgattagagttcaacatatagtttgcttttttccacaaatatttatgttcattaaataaccaatgatggaaaactagtataaataccttaacacagtcaccaacaacatgggcatcctcctcaggaccaaattcagtcttgcctggaaatatcaattaagaacaaggcattcataagtttcatgtatcaaaaaataaatccatatattaaactgagtgtctacgtctggatattatctttactggtctttcaccaacagaagggttgaactacaaaaatattcataacatcggttctatatagacggtggctgattctaaaagtagccagcataatttataacataaattggatggcaagaaagaacaactacttcagaacaatataaagttcttgaaaaggtgcatagatatgcttggttagaaatctcttctacccctctctaaacagctttttgtaatttttgatgatcaggatttatgaaagttagatttcctttcccctatgtttttttctctccttgctgtttccccaatgaacttcattgctattttttttcttgaagcccaattaacttcattaacgttctctgtaccaagtaccaacaacctactctcttcaaatgcatgtaaagtgctaggacgtttaagataactgtttgtaccttgttcatattcttgaactctcctatctacttcctccacatctgcagactgtcgcagtattccttcaactttagttcctgcaaattaaaaatagtaaaatcagcagaagcccttcactgaaaaatagggtagaagtcgtgcattcaacatttttctttgtcattatgcagtcagatgcttttgcagaaagccatatcaacatcacatggaaggcactcaaattattaaacaaaggaatcatctgctttgctgatagatgagctttagtgtccaatgtgcttcaataattgcacaccaatgttgctatttaacgattaagtagcttaatttacaacattttaaatcacaggctattctccaaagggtcaaggttgaagaggtaatttgcattttaacgtaatacataacacgaccaataaagaaaaaccaaaatatccaatgcaacatgatctccagttgaacaaaatattggaaaacttaagcacagggttcacttatccagacagaccgactagccaacaaattttgaacaaactgcctatagagaaataaaactgaacaagtaactcctaaaatttgaatcatgagaggagaaaaagtgaaatgaaatgcagatgcatcacatatataatagaagatcataacttaccatacttctctagaaaccgaagagctttttcaaggaaagatgggcctccatcgatatcttctagtgccagcagaattggtcttccaacaaccagagacttaattggacgtttgtccctccctggaagcaccgcacaaaatatagtgaaaatgaggacagatttttttctattgaaaaagaaggatgacaaaaatccgtaaaaacctataaataaaatgttaagaaatttaaaataaaaaacacagaatcctagcaacaccagaattgacctataactaatataagctagtaaacataaaatgaataagatttaaggaataatgagcacatacattgatggaaagacccttcaatagaatcacttgcgtcactccgaaaaatcccattgtgtcccataacaagggcagcacttggtgcctgtgcgagggcttgttcaagagctgtcttccattcaagcaggtcttctgatgtctcagcctgatatttgagaaaacaatcagaatttatatggcccaacaattaaaaagacattaagaagtagtacaattgaatttaattctcattcacttaaaaatataataaacacatcaccttaagggtgaatgctcgcccatcacgtccatctggaaataataccgtaagaagctttttgtcttctctaactacaacactggaaaataaaattcacaacttttagacagattgacaccaaaatttacaactacaaaaaatcaatttatccaacatacctccctgaattgtttaagtcaataccccccaatgtcaggtttacttcaccacctctctgtggaagggcactctacatgaccaatcaaagtaaagacaattataaataataacaacaaaagtaacttgatatttaatatattagagtaaaataaatcagcaccaatagctaagacttttatagtattattcaattctctgttagtctacagtcacttattactctccaataagaactgtaaagtaaataaaatgtcatttttccaaaacatatcagcacaaagtatatccataaaatgttaattagttcatatatcaagaaagcttaatcaatcactatattaatttttgttatcaaaatcatgatctgtaaccatatctgcttaattgagaattgaatcacacagaacaacagaacacaaaaagatatcaaataaagatcatagcaagaatgagaaagatttgagagatactaacaggatcatttttgaaaaagaccaatgacgtgcgtgtgagtataaaccaccgcttcttccaagacttccagcctattcctacagaagatcaaaatgggataacattgataaattcctatatcattgattaatttgaatataataaataccatcaacagagaacagaaatgttaggtactccccattagtagatagttacaataggtcagtagttgcctatctattagttatagagcttaatggtcatgcactgacggtgcaaaatagttttacactatcatacaattacaaatcatcgttgatatgacttcttaggtatatttattgtaaaagttaacaaacttaccataaaggatgggttgtgattggatgacagagtaaaactgtcatcctcttacattaccagtgcatagtcttttttctcttagttatattagtgagttagttatttaagatagtttggttaaggcatttttcctataaataagaaggggtgttttgagggagggatatcttgtcattttgtaagaggataggggccaattgggcagtaggaggtgcagaccctcaaagttttgcaagtttaaacagttttctttcagtgattctttagtcattacaagaagctaccaaaatatacaaacaaaaaactcctttcaagagaatatgaaaataaacaacaagaaataaacaatcagtggagacagagattcagacaccaaccttttgaagatatgaaaagtgggccacttttaaaaacctgccaaatagtaacatctgttaggaaccacagggtagctccagactaaacctaattgaaatgaaacaagtgtaaccaaaatgcatgacagcccccaccccctccaaatccaagttgatcctttggtagatactaatagcgtcatatttaggaatagtagatatcaagattataattatttaagaacagtatatcttcttcaaatttgtcaactaccctatatttttttcctagtttttccacattttggcaatgtagttcagtaaacgggtgtcttaataggttttacttaatgggttaaattgctaaatatattttcttttcacttgactcacctgccaatctgttcggtatatactttcatcctccaaactgtaaaattccttattaaatttaacaaaagagtaaacaaataaagatgaaatctgaggtactaatctcagcctccaacatgccaccaactatcaatcacattgcccacataaatcccgttcattgccacataattataaatgcaaaaaaaaaaaaaaaaaaatctttaactaaactaacatgcactgaaaatattaattttattcaaaagaaaattaatcttatgactaaatttcagttaaccttacctaaattacaatgtgcattaactcgaaatcgattattttcaacaaaaaaaagtcaacaaaatatctgcccctccaaaacaaaacataccgtattagaagccccaggtctcggtcgctcaaaagccgctgaaggagcagacatttccacacaaacacagtatcactgaagaaccagcattgccactcacttcaaacccaaacaaaaccccatcaccccacaaaaaaaaaaaaaaaaaattaacctttcaacatttgaaaaccccacaaaaccaatcacagttccctattgagtcaacccatcagagagatccacaagtgagttccaaccccaacagccacaacaccaaaatcgctgagatctgactgaaaaacctcaaactttcagcacctagggttcaaaaatcccaactcgattgtatcctcacataagccacaacaagggcaagaccttgcccttctggggtttcaattttccgtcacttccttggcgattttttcgcactttttgaggcagattaggtgcgaggagcaagcaacagtggttgtgttgtggtggtgatgtgaaaaatctcaagagaagaaagggttctttgcttttcacctacttctggtgtcttctgagagtgtggaggtagagagagaatgaagggtagagagagaacgagggggagggaaggtaagggtattgtgtccgatatagtcaagtttaagtcttgtcaggtaactgtccaatgaaaatgagccacgtcagcaacataccagagttagtgcctgtaaattatgaatgttacctaaacacataaataatggtctcagatggatgataggattttggtttgggatggtgatgattctaattcaaattcattcacctccttaaattttttatgaactaccttataaaaaattaaaatcttcagatatcgatcacatcaaataaagttttagaaaaaaaatagtttacatttttagtttgaataaataatttatgcaatctaggtatagacaatcattttttttaggtgaaattctgatcttactaaaaaatcttgtttgatgagtaaccacttttcacagatcatttagtacccctatgaatcaaggaatcaaatgaaaaccgactttgggtaaaaattactgtttaaggctgcacgacttcattggtgtcctacatcgtgatattgagagagtatttctccattttgtcactttttactcaacaaaaactgaagaatatatactgagatattttcttctaataagtttatttattttcatacgtaaagctcaatctatattgtttaagaaattcaaattttatattctgctcaaactaacaattatataataagtttatcaacttttataataatttttttaaaattattattctaaaatttgaccaaaagtatataaagactgattaatattttttttccattaaattaactttaacttaggtgtattaaacactttatatctaataatttggttaaattattttagttttgagtttaaaattagtgtcaatttcattgattaggacaaaaatgattttaattttacgaatccgaagagttccagtggaaaaatagtttaagataatgtaggaaacaacttcctgttattccgtgattgcctcttctgttcagcacatgagccgcaaagctctatgatgaaacacctagaacatgctgtatcgcatgcttttctatttttttattagttttgtttaaaaggagaaaatctggtttatgatgaaatggatttgaacttgggtaatgcaatatatgttcttgtttatgatcaattcatgcaacaaagggatgttttgattctaacttataaaaggagtaattcttttgttgtaaaattaggaagttcaaaataactattattgtgacaactaaacaaattaaggaactaattaatgtatgaggttcaaatatactgtagtatcatgattaacagcatcaaccaatttaaattttagagtcacattaaagttaaaatacaaaaagaaatctgttcaaagcaaagataaaatgtttgcacgtgatgtctctttttttttaaagaaaaaaatatattaatagtaccaaaattgatttagtatttcaaaaatcaaagggggttattaattcacactcgaaaagtgtgagaatgcccagaggatgatgaacaatttattatcttatttcaactccttattgatagaaataattttgaacagtccaagtggatactcttttttccttcttttttaaatcaacatgccagtaacacattgttttttagaaaaaggaaaaagggatgaaaaagaaacagtacatagtcatgattatggctttgtattagagccatctaccattctttattttgtatttttctggtcttttcattatgaaagaagatgtcaaagttaaaatggtcattgaagcttagcttacactgcaacaaacccatcgcacatacatacatatatatatatataatataatgtttatagttattataatactaaaaataataaagagtgtgcaattgtgataagagcatttcattggtctttgtttgtctcatttcgcacttggcattgcctcgtgcggtggtagaaaataagaacatgggacagagttgttgagggggtgaccggttgggaaggtagccggtggaattgctgctctggacaatttgtctggttcgtttagaacaaggaaacgatgaatgaatgaggttacacttgctaggctttgtcttttgggtaccttttttcgtgtcaccacccaacccatcacattctcatgccatcatgtctcacggtggtccaaactcaaaattcactgccaatacaagcaaaccagattataaataagtttatatttcaatgttgcaatgaacttaaggcataatttagtaacacattcttgtactaaagaaaaaatagaatcaaatggttattccatttattatgtttagtgaatttgatatataagatgggtagaatgattgaaggaaaaagaaaagaggaaaagatcataagtttaatctccttttactaacaaaaattaacattctaacaattaatatttttggataaaaaaatagttaaattaaatttttagtctctcaacttttataaatttcaatttttaatcctttagaatttttatactacttttagtcctttatttattttctgttagtaattttagtctttctaaattttttgcatatttttaatcttttatttatttttattgttcataattaatttttattgtcaatttttagtcttttatttattttatatttgaaattactcttgagcaataaaaaaattagaaattaaaaatgaaaaaaagagagagaaactaaaagttatgatgaaaaattaaccgaatgactaaaaattattaaaatattttaagagatcataaattataatatgaaaaagttaagaattataaacttaattaaccaaaaaaaattatgctaagtgaattgtttgccccaacttagcatcgggctacgagtcaaagtggtaggaacgcgcaatgtcaaaaccatggcataaattagggagaggctaaaatggctaaaaagagcaaaaagaaaaaaaaaaaaaaagttaacatgagaaggagcatatgttaaaaaaacacacatagagggatctgtcaggtggtacacaccccactagtactttttgtacacaaggacagaacaatactagaggaatagccttataaaacatctttaaaaaaatataagaggagttctttataaatatcccattaacatttatatattttttttctatctctttctattatattatacttcttttattttaaaatgcctaatgtttaatatttttttacacagaccaataaaataaatatttcaagaaaattaatatttattaggagataattttattaaaatatcattattctttctcttaatttcaataaatattttattggatcttctaaaataacattatttattacatgacagaaatagatatttacatatttcattaaaaaataataacatcaatcaatttgaattttttttcaaagacttaaacattagttattttgaaatggaagaaatgctatctaaactaaatatcttttcagaaatattattgatcatgtatggtgctagaacttgataccttgtgcatacaagaagcacagtaatagttttgcctttgcccaactgaaagagatatatgtgcctgtcattccctggccacttttgtccttaaatcaaatttgtattttatttttaatttaaaattcttttcaaaaacttgttgatttctatctttcttatccaattttcagattgattatcattttttatttcctgacttagtattaattagagataaatatacttaataccaatggagtcctcattaattgtgtacgttgtcaagtacctagccatgcaaattggtttcctctaattaacttgctctttctcctctcagagttcccattttgattaattataaattgtaatgacttaagtttttggattatcatgattactgagaaatgtaaaaccttttttccaaatggcatgtcgtttttggaattaccataaatagtgatgacaaaacttaaattttttttttttgggtggtggtggtggtggttggggggggggggggggggggggggggaagaattgccacccccaccaatcttatgctccgccaccgatcatgtccctcctcgaaatgaatggtccccatactttagcataaaaacattattagaaaggaaataaacatagaaagatccaatacgcgttttaagtgcaaaacaagcataaacaggcctgcaattcataattctatatgacgtgattattctttttaataatcttatcacttcataccaagaaaattaattctttttaagaggattactaaataaagtgttttaagaagacatggtcatcatgtttttccgatgttatctaaacagattatatccaaaaactttgattccttagacggccattgtccaataaacaataatgccacttgaaactcacgccacatgtgacccatattgaaagaaatctttctcacaagggtggttgaggcagcaacgttcagtctgaaaaatcgcaaggatgaggagaagaacaatattgttaatttcaattatgaattactagttctgaaaagtcaaaaggtcacgtagtccttctttggtactacattgttatatacttgcatattgcatacttgcatatttcaattatggtttcctattttatcattcattggatactttcagctgcttgtcaccatgattacttggaaaccatcatggtaatcttatatatttgagtatttatgaaataagctatatatagttttcacgtaaaccgaagagaagatggtagatatttttgtttcttcctcccccggtcctacctttatcaaaatcattactcacaaaacaaaagaacattcttatttaagttttatcttcacattatgaaatgctatgtagtatttatcttggttagattactgaattctatataaaaaaaaatccaaggttcattaaatcgaattctccatcttgcaagttgcatacatggcttaccaaattcacttaaaaaaagagtttctataacctaagtatccatatgaattacatccccatatatatagtgtttctggtacgtattggatattatccacctttatacgtaaaatttaatttttctctgttgcacatgcttttgttgtgattgcatttgatgcatgaaaaataagtacaaacaaacctgtttctcactgacccaacagtatctcagtgagatatatatatatacaagaaatttttaattaatcaggaacatttcaaaatatagatgggaagaataccatgataactaaataaattataacgtacacatcagaataaataaattataacgtctaataaatgttcacgataacccatcacagtgtcttttaaaacatgagttctttatatttttatgctaattttatacaatttttttatgatgtgctatagctgtatccatatcgtgtcctacgaagtactatttatcttatccttatgtccgcatggtattgtattcatattctgcattcatggatttttttatacaaatgtcatgttgtgaaagatgcccttaggtaaaaatgccacagacgtacatgtacgtacttcaattaagggccatagaaaattcaatcatattcattttatgaagaggaatcacagtgtttgctccagaatctgttgatgaatggaagatatagcattagacagattgatgagggatttaaagctagtagatactgaagaaagagtgggaatatgattatttgagaagtagcttgaacaagtaacttttaagtcttaatgttatgtggcctatttcctgaaaatcataaaatcagtgaggaaaatttagtcaggcatgcagtggggttggacttatgttggcaagttaatgttgagtaattggacatagtgtgaatgtggagataaaggagctaatagaatcttgtcttctaatgctctgtaaggaaggacaataccatgtgaagatgcctaatatggttcatgatggggtgtgcaatcaaggtaaatgtcgcaaaaaaatctagatgcaaaaagggaagttttatattttcaaggacaatatcaactttcctcaccaattggatgctcctaaacttcatataataatgtcaatacatactgaaagtacctttggaagatgcatcaaattgtggttgtaatttctgaaaattattgagtacttttgccatcactgccacaatcatgtgaaagtatcatccctgaaatgtttaaagccattagaggcatggatgagttaactgtcctttctctaagccattgttaatagtcctagccctttttgctcaagatttttgaaccagcaagatgaaaactcaatatatgacaatatatggaaaaagagaagtgctctataagaagataagtgattaggtatagttgaattcagtaagaaacctattcacatgtgagggagagcaaatgtcctttcttgcctctcacttcaccaaaattcacaagcaagccttataagtttttatattttgtctcttactcctataattttgaatccactggatccaaactcaactatatttgagttttagttttcttggggggataggggttaatatttctacttaagcccaataaatttataaagttgattttttttttgtctttattgacataaacaaacttaaaacctagtacctactaaatttaaactttcatcatttttataaaaagtatcatatttgtctacttcttagtatttccagtaattaaataaccataacatatttggagataagagcgagagtaatacgtttaaattttaaaatatgtaaattattttattatatatgtgtttgttaaaaatttatacaattgtaatatttatcaattcatcttcaataacaatgttattttggctattgttatatccactctccttttccatttttttttaatcaagttacttaaataatttttccttttcaaatcttcttccctctctttcactcccttttttcttggtttcttggtctatcataaaggttttcttatcctccaaatttcaatttagtatatttacactctctaccactttactttcttgttttatttttgtctactcacacaacattattaatgtctctcattttatatatgcagcaatatataactagatcttaaatttatcgaaattgttcagattgagctatggatatcaattaatatgctttatccacttcaattttttcactattatacattttttatatttatatagggtttttaatgatcctagtattttgcttcaattttttctaattgttttttttacattccataaagtaatctttggaacataaaacaatattattgaaagtacttttcataacacagttttatttttattctgaaaaatactttcctaaacacaaaaacagtattatggaaaatactttatgaaatgttaaaaataaaattttgttctaaaaatattttttcataatgttaaaacaaaacatattgttttaaaaagtactttttgtaatagtggttatgcatgaacattatggatataaagagtacttagcaaaataatgggagtggatttagcaaaggccttttttatgtaaaaaataaaaaggttgtcctaaagctttgaatccaccaccaagtttcatttgtgatagttgatttttcacttttttcgccccgaatgaaaagtcttcacaccgtattgctccggaatctagttggtctccatggttaagttactgaaaaatttaaagacattatcgaagtttcgaactttacaaatttttgcaagaaaaaaaaatagatttctactataataaggattcatctatgtgaaaattaacggaaggaaacacacaaaaaaaaaattaagagaacaataagtgtaaaatgatgagatgtagaattattgcgtgaaaaaaatgttatcaaaattgtatttataaatattcacaaaatgagttgtttggagattttaattttaatcgttggaattatcaagctttatcattctggagcccttagaatgaaaacaattatctctttaccatctttatttttttttcagcaaaagggggaagaaatactactaagattaattaggttccactaaaattcagaagagctgaagaggcaaacaaatacagaataccaattctaaaattatcattaataattatttcgaaaaaaaagttccaccaagtataagcaaaaggtaaattttcactaacagtcatagtgcttaaataaacagaccatgaaatgcaatgctccaaataactttataaaacatccttaatgcttacatctagtgatagatctaggatcttagtaaggggcattttttttttttaaaataattaatatatattatgaaataggtaaaaaattatgaacagaggatcaaatacacaagattggagggtaaaatctacacactcaatatatttatatgtgattttaaaaaaataaggaaatgaatttgcacctctcattataatgtggatccaccactgcctacatcagtttgttttgagcattaccgcatcctatgtcatgatcttgttgttggtcctggggtacaagatcctcacttcttggatgctatgggaggaggaacttcattgagattgcaaaatataaccaaatttgatgacacaataaatgaaaatcccacccaaaatgataaaccaaaaacattagtgttattaatccatgaaaagaatatgggagcaaacgagttaaagtctgtttggatgtaaagttatgagtgtttttgaaagtttttctactggaaaaaaactttatattttcagtcgaaaaactctcaaaaacacttgtgattgtatccaagagactcttagtcctgcaagctggaggtacatgacagcaaatgcagcataggaaaaaataagataaggatcttgttttcctttctaagatatgatcacattgaatatattgttttgaccaatgaacattataaaataatttaagacaacaattattttgggatggagggaataatatatacttggctagctagtaattagtatttaccaaaaaataaagatgtttggtagtggaccaatgcttagaatatagatggaacttacactggcttaaggtagttgtaagttgtaacagtgctatgaagatttgaaatttagagggatgttgtataggttgtaggtggagatgagtggtgtgatattgatgagaacacaacaaaagagagaatattttaattggatacatcaatttctaataccactacacattacatagatagaagatagaagagtgatgatggagaagagggcgatggggagtacaaggacgaagggaggggtctttggattagggatggcaaaacgggcttggtccgccgggccggccagcttagcccgcaaaaaaatgcgggctgggttgataatatcaacccgcaaatcaaaagcgggccgggctggcccgccctgcaaaattgcgggccaaacccggggcgggacgggccagcccgctgggcctatattatttaaatattaaaattaaataaatatatttaacatattttgaaataggtatattcttttaatttatactcttttgcactctcatgattaacttctaagttttaatattaaaatggttatgataatgatactttcaaatagtctttcattactagcatattatacttttgaacagtttataaccgtaaatttcatttgcaaatggtataattttgtgaattatcacataacatcatttatttagcattaattttaaattatttacttttatttaactttgtattttttttaattatcatatttgtatttttttataatttttttgtattttattttttaaattgacttttttattttttttaaatttttgatgcgggctggcctgctagcccgctggcttgcattaaagcgaggcgggctagcatttgtaacccactttgcaaaagcgggccgggccagcccgtcccgtatttttcgtggatcgggccaacccgccccatttttttgcgggccggcccatttgccatccctactttggatactcttatcatataatgtgaggggtttgggggagggatcaagtgggagtatgttaagaaaataaataaaagtaacagttgtttccataattatattaacaaaaaagttaaaatttccgttttaaaaatacatattaacttttaaatatatatttaacttgttagcttaaattgtgcatgacaatcactatttatataaaaaaattataaattaattatatttgaatacgaataagaattaatacctctatcaatcaatcactgtcttaaagatataattatgaattgaaaattaattatatattaatgatttaaactcgagactaatattatttaaaatagaacgattcagtatcaatttatctatgtattgaatagtattttatgtcattgtaatattgataaaaaaaaaaaagtaaattaaaggcaatataaaaaaaggtagatcagtttggtgactttggtctactatataaaccagatgtgaatccacacaagaaattacaaaacacacacacttaataaaaagtaaatgggataactctataattgtcataacgttaaattaacaatttcgaatagtaaattgtaattgcgggggaacattttttggtttttagaaaggcggtaaaatccaaagtcaataattaaattccaatcataaagcagaaggtggcgagtggttgtaagaggaaaaagtcaagaagaaagtgacagtggatgaacacaagagaaagaagaagaagaaaagggttttgtgtgtgtcgaagtagatcgttccttccttcaattaatctccgatccgaaaccgaatggggattctatacgcgctggtaggtcgcggatcggtggtgctggcggagttcagcggcaccaccaccaacgccagcgcaattgcgcgtcaaattctcgagaaaattcccggcaacaacgacatgcacgtttcttactctcaggatcgctacatcttccacgtcaaacgcaccgatggactcaccgttctctgcatggccgacgataccgccggcagtgcgttttcccgatccgttcaattctaaacctaaatccctaatttattcgtttttaacattttgaatttgtttttttttttctgtagggagaattccttttgcgtttctcgaggacattcatcagaagttcgtgcggacttacggacgcgccgttcactccgctcagccttacggaatgaacgaggagttctctagggttttgagtcagcaaatggagtattactccagtgatcctaacgctgataggatcaatcgtctcaaaggtgaaatgtctcaggtatcgtatcgttttttttctctctctcttcgattttatgcagtaattgaaaattgagaactaattgtgctggtgagtgtgtggttgaacaatcctagattcctagcaatggtaagaattaataagttaataactagtagaattgcatttaattcaacttcagttcttttcttcctttttcagctattcaaacactgcgtaagtccaatgaacaagataattgttccttagaaatgtaatatagacattaaatttgtgattaacgggacaaatacatctaataatgactaatgagaagcatttctatttgatatacactttgaattttacattttatactcaggtcttgtttggataggcttctatataaacacttatacgagaagaaatagagaaataaaataaatcaaacttctcctgtaagttaaaatctagtcatgcactttagcttttagagaagttattatatgagagcttttaaaagttaagctgtatcagactataagttcattttaacttgtgacttgtgagagaagcttgatttattttacctctttattttcttttctcataagtgtttgttaagaagtttatctgaattgggccttatgtttatttgattcacttcgtttttctgatctcatgtgtgttttcttttcttttgggttctttaacaggtacggaatgtcatgatagaaaatattgacaaagttttagatagaggtgatcggttggaattgctggtggataaaactgctaatatgcaaggaaacacatttcgcttcaggaaacaagctcgtcgtttcagaagcactgtctggtggagaaatgtcaagctttcgtatgttcttgatctaaacctcagtcttattagttgaacttataaggaaaaaaatgcagtctctagaatgaatctgaaaccttttctccatcctttttatattatttcttgcattatcaactggatgttcataaatggaatatttgtcaatatccttaaaatcatctagagtaaaattttagatatttgataggattctgatggaaaccagctgggcttaaacttaggtggttggatgtgtggggattaaggtagaggttctggtttggaacttgaagtgttggtagaaacttcccaaggtgccaaaacatttttcttgatagaaataattccactgttaatttttttcttataattataaaagaagaaaaattatcagagaatggaagagtagaagaggtagaagtgaaaaaggttgggggataagaaatccttggcaaagacaaaagaggagaaaaaacagagaaaaaatgaatgctcctaaaaactagtcaatgtaggagagttgtgcagtcttgttgaggtgaggaacacccttgaagatgtgggcattcttatcaaaccacaaattcccataaacagtgcattgccacaacatttttattttccttcttattaccaaacccttcaacttcaatgtatagaaactgatccagtgaactagaacacacccatacctgagtaatggagaaataaatgagacagtttcaaacttagatctagcctctgctttggtgttggaaaatcatgtcctgcactttctaacaaaaacacgtgtcccaatataactctatggtcataaatttggacatattctaatcatgctcaatggttcaaaattaattttatcaaaatcaattgtacacgtgtcattagtattaataaatgtaagcatgtgttgtgagagttcaattaagtaaaatttgaattatctctactagttttatttttagaattatttcaaaatagtaggcaacaaacttgtttccttcatacaacttcataatactattaatcaatctttagctatagttatgctcattttttttggtcttactgactaaatggttgcatgttgcaggattgcacttatagtcgtcctacttgtgatagtttatgttgtattggcttttgtttgtcatgggcctgcgctgccatcttgtttttaagtgaaggattggcaagtgaattttatgtgtgcttccttgtcttcttcagcttgcagaggtcacttctttttcatctgcctttgttatgcagacttccatttcttcaacttaaattgctgggttgtccacttttgtgctagtaaatttcttgcaatagattcaagtgttttgggttgtatttttcattacaaggcttgaggggcaaaacattttttgtatcatgttatatattgtattctcctaccagcccaaagatttggattgaaccagaaaatgactgagattataattgatgtatagtgttgcagcttgaggttgtcaacgtgtcatggatgttctcttgttcaagagggggaagggtaaaccttaaattccatgtgccccttcatagcttagtgaagggggatttttaaactgctcggtccggttctcttgtccaattgatgcgtgtgagccacatatgcttattgtatattttcttaaatttatctttgtctgttttaaccttccttttatgtgtcaagtgtgaactgtgaagtatgaaggttcgtgactttatttcttttcgcgttggtgattctgaaacggtccaaagaaaagtgattgtgatgcaagagacctatttcattataatcagcaacaacgtttctgataatctggtctatggatttagtaatttatgtcttttttgtcttcgtattgcaacttgcaagttagtttaacttaattttgaggaaataattcctttttcaaaagttattacacaatataacataatattaaaacaagttgaaccaaacatttacattatgacttgttgcacctgctctacttgtgacatcccttgtaattcgcttttagttatagtgtttaggatggtcatcgacaggtaacattatgctaatgctagcccatttctttttcctaaccatctaagcccattcccatagaactagtagttcagtatttgatctgaaaaagtattgtgattgttgttgttagatttcctgttaaaacttaaatgattgtaatccttacttaaggtcattctttttctttttacacaataaattccctttatcttgtgtgaattgtgattgttgttctgtttgacttgcttccaatatatgttactggtcttcacatgttacaagcaagagactgtctgtatgtattgtgcattatttccatgaaaataaaggtaaaaatgtaacgacaaaaaaaaggctttttttttttgtaaatttgagaaattaaaaagtgtaaattttaatttgaggactaaaacagacttcctcaaatttgaggattaaaaacatatttaaggatccgacttgtgcaagaaaatgactgcctgattatattactttgcatgatactgttatgtcaatcacttgcattagttattaaacttgtataattgaacagaagactcttgtgctcaacaaaattactataatactaaaaaactaaaaaaataattcaaagggtggcctaactattaatacataatcaattgaatgaaaatatatattgtctttataattgtaactcagctgctgactaaatttctgtcgctgcaaaagaaaacatagcgagtgtataaatttccgtcgctgataaagaaatatttctctaatacatacgactgaagtatatttggtttatttgacaaattaattttcaaattaaatttgtcattatttgcaactgaaatatattcggtcactaattgatgaataaaaggccatttgcgactgattatttattggttgctaaatgacattttcttgttgtgagtattttttttgaagagaaaaaaagtttaattacttcccgttgaaaagaaatagaagtggcaaatgtaagtaagaagcctgatattgagtgttgataaacatattgagtaatatattgttggaccttttccttttcaagtgatcttatgcctattttagtttcaaaataaagtaaaaaaaaaggttacgcacttacattattgtgcccttatcattataacttagaaaaatctacatatttaatgctttaatatttttaaaaatacctaagttccttcattaaatgtcaatcccttgcacatttaacaaaaaaaaaattgttttaagctcaatgacccaaattacccctcatccttttcctaacttcgagatttaatgagcattttatcacaattcaagataaagaaagtattttccaatagaaatctcatccaagaatcaagctatgcttaccaattcataataaacatgaaaaataaaaataaaaagctaacgttgaagaaaaaataaatatataacactattttaaaagaaataaatgagaacataaggttcatatacaatctaatcccatcaatggaggacttaactacccatctccatgaataacacccaaaagcaagaaagatgaaagaacaatggaaaaagagagttggagaagaagaactttagtaaaggaggtgttttaatacaatgacgaagcgtcccttaaaaaagaaagaatctatttatatagacccaaaaaatctctacttaagtgagtgtctgcccaagtcaaaaatttcgaatttaaacatatattacaatttgcacctctgtccaaattcagcttaaactaaaagttattttgctgaagctaatttttctctgtaactttctttttgatcttctcaaaaaaggaacttcgatttggatcctcaacccaaattaagcacatttgagttgaaagttttatttcaagctttcattaaaccttgctcaaaaaatgcaattcaatccaattcaatgtcctacaaaatagtccattaataaacatatgcaatctagtaaaataacaagttaaagagaaatttaacaatttacatccaaaaaacataaacaaagtcctaaataagagaaaagataagataattgcctaaattcagatgtcttagttaggtatttttggcaattataagaagtcttacattgaatgaaaaaaaaaacgttttttttaaagaaatatatttattgcatttcattcaaaacaacatcaaagatacaattggaaatatgcttaaagacatgattgctaacatgaaacttagatgccttaataggggaattgacaacttaatttacttgtctcgtaattaaactcaatctaaaattttaaaatgaatatattgaataacacgtaagtgagaagaactcaaaaaatttaatgttttaaaattttgaattaaatctaatgtacaattcatatgatttatttattatcatgaaatctataaaatgttgacaattgttaaatacttaaatgtagttttcttattattacatgtaaatccttccctggagatgtatcgtcaaaagctttctttatgttttggtgaataaaatataaactttatattatttatactttttatatttttcatatcttttttggtcacgttaattcttttatttcacatttttaatctctctttgatgtgtgaaaaaatgataaattaattactacaatataaatatagtttgtcaaaatataaatattttttcttaagtaaagtatctcgtatcggtattcctttatttgttagaaaaaatcccttcacagaaagcttttttcttttttctgaaaaagtgcacagaaagctttttctgatgcacaaaagatctcccttcatcggagaattttcctgcgcacgcggtgcgatatgttttaaaataaaagtaggattgaaatcagtttttcatattaaaaaatagatcattttaatattattacttattttttttttcaaacaactaattgaatttttttttatgtttgaacttaatacttatgattagtcttatctcgataaatgataacatgtagtatcatattatcaaatctaataattgatacattattaccataccatcatctttaataacgtgttagtaattaaattttatgacatgatatttcatttatcacattattatgtaatagaatgagattaacaataaatactaaattgaaataatttttttccaaatcattatttgacaaaaaaaatgaatttttagatactaatataaaaataacctaattttccatatataaaaaacatggaataactctcttttctatagtatattaataatgataagaaagagggaatgcataattaagagatatgatagtaactgtttgcaacgtggcagttgacgataaccatccctttggtatcattcaagaagacgatctttctttgagtagagttcattgcatttccaccagtgaagaagaagtcaatttgaaattggaatcccttttcatcggcataatctttcaacacaaaaatcaaacggtgcataacaataaataattgcccgtgtggcaactgaaaacaacaaaacaaaccattaccaaaaagaatatggtattaataccactgtcaaattttgaatataaaattctcaagaacacaaaatactcacgaaacagtttttaaaaatgaaaggtatgattgcaaagttctttgcactttctcctccactagataagtgttgaagttgattataactctgttaggatatgaggctagaattgtttttgagagtatttttactaaaaaaaaatactatatttttaatagaaaaattctcaaaaacactccttactcgtatccaagcaggccctacgagactctcaacagaaatggaaacatctttgaaaaaggaaaatatttataaatatataatatagaaataggtagattaaaatagtatttgtggttgatattataaggtaaagaaacattgatgcgatgtagcaataattaaatcatatgcaaggtagtgttgtcgcagacattacaaacttcaaattccttagtaacaaatgatgttcttctattgattcctcaatttctccgactcaaaacttagtttcgtgtttgtgatctctgaattatattatatcgatttgtgaattgtttttccacaaaaaaattcattcaaaccatggcttcattatgccggcggttatccgccgccgcaccggccggtcactttcagttccatcggcccgccgggaattgcgcggttcgatacggttattccgtccgccggccaatgcggttggttgcggcggggaccaccgtgggctgcggcgggtgggtgacatccgacgtcggagggagggaggagaaggtggggccctgctcctacgccatggaggatcggagggtggcggaagatggcggaagcgatgcggtagtaggaagtaggaaccgggtggttgaagtggcggcggcggcggttgcaacggtggtgctgggtgttgggaaccgggttctgtataagttggctttggttccgttgaagcagtaccctttcttccttgctcaacttgccactttcgggtaaagtcaaaagacaaagatagtagaatttaactgaattacgttaaggttctaactgtctttttttttttttattcgttagaataaagattacgccatggacttgcaataaattaagtactcttgtttaactaattaactaattcgactagatccgaacaactgtcatataatataattatagtatatatttacttttattataagtaatttaaaagtataatttagggtattttttatagtatactatttcagttacaattcagttcaaaatattattttacttaaaaataattaccacatacatcctgacatgtattaaattgttaaaaataaaaaatgtatgaaaaaagaatatatgcaatatcagtataaatgtgttttatattataatctaataatatatatatatatatatatatatatatgataaatttattatttttataataaatgtgtatatcttttaaactcaaaatgtattttttaggaacttaaaatttatattgaataattgaaatgtgcattttgttattttttatgctaaatttgccgggttgtccttatgcttgtggacctagacccgttaaaatcatcacatggttttgtgataacttttgtgcactcctcgtgtccaagaattgtttccttttaaggtgattttgtggtcaaatgttgatttgggtgattgtgaggccatttattttaatgtttacaaaattgattttgacagaattaattttgaactgttacacaacttaatataaatgtatatataaattaatctcaatatcaaaaaagtaggcagcaagaaagagaattgattttgaaacatgcatcaccatacaattaagcataaaatcgattgatgttgcttatttgatttcagatatgtaatagtgtactttgcgattttgtatattcgacaccatgcgggcattgttactgatgagatgttagatgctccaaaggctccatttatagttgttggtctattggaggctcttgctgctgccactggaatggccgcaggaggtaactttgcacactttgaatcacattttcaactcattctaatttcttccatcagcacatcaagtttgttttgttttgtgatgatgcactgatattcatactatatagactatagtaggccattaatggaattttattggtgttagtttgcttcatagaatagttggcagaaaggcctccctaatgttcattagatttagagtggagtgtgtatactcagattgcaactgtgcaactgattaaagaatatctcatagatgtaaatattgctatatgttgactaaaatactcttttttagtatcccattatttgtaataaattgttacagtctctacaatgcttatacttccagtgttgacaatatacagcataaagacttggactgctatagttggagatgctaagaatatatattatcttttagttgtataattttatttctccacgaaaatggtcacattctgaattgatcatctattgtgctctttcttgtatcagcaattctctctggagcatcgattccaattttatctcaggtaaaaccaatcagcagtcaattgctctctggcatatattcttaattcctgttactgttgcatctggtgattgttctataggatgacaatctgtgtttagctcatatatttacaacttgtgcatgtgtttagtaaaatgtaaaataaagctagataattaatttgagctatcctcttgcagacttttctagtgtggcaaatactcctgtcaattatttttcttgggagaagatataaagtcaaccaattacttggatgctttcttgtaaccattggtgtagttgttactgtagcaaggtcagtagtacatctaattttattaaggatcttagaccatggtgactcaggttatgagtgtcaaaaagggagcattgttgaaccatgataccatgatacaagtaatgaacatggtctacaaacaatgttgtcaacaaactaactctgaaaagtctaagcatcttgacacaattattattaaaggttgtcaagcaaattgatttaatgatactattaggtttgttctataaactcagaagtctaagaaattgttgcttgttggtaaaaaactgctttgttattgaaatctaacataatgctttcaaatgttaattacatctttcatgctgcacaacaacatcaaaattcttggactgacagaattttctcccaaggcatgttgaataaagtatgtctggtacaagctatatgaaaattgtggttactttctatggccttcttatttatacatttgtttactattgtagtggagctggtgctgggaattcattaaaggaaggtggtatgttttggagtcttttgatgatagtttcatttttcctccaagcggctgataccgtgctgaaggttatcatggtttataatgtttgttgcattttcccaaccttcaaactatttctctatagtttacactgtccttttcatactttgcaggaaataatctttttggattcatcccgaaaactgaaggttcgcacaatagtgacttgttttaattcatgtttatgctaattatggctttgaatgatcttattgggccatttgacaacctgaattatgcaataacactacttttgcactcacaagcacatgcgcctcaaactataatgcagagaacaacattactaaattgtagtatatgtaaaactttcactttagtgatacatgatggactcattttaatacccaacctaaactttgcattattctattgtgcgagactctaaagcttccaaaccacaattttcagatgcatgttgctaaactagtcctatttaaacctgaaatttcttttcctgacatgaatatactaatcaatattcaatattatctgaaatagggaggctgttgtatggacctttttgttgtcaattcgtacggatctgctttccaagtaggtagcctgcaatcttcaatgaaatgttcatcttttggattacaatgaagtgtttactatataaatgcaaataaaggtctaaatgcaagaatatatgcttagtgtaggccctattcgtgtgccttcttctccccttcttgtcaaaattatggggcattcccttcagtcaactaccaaactaccttaaagatggtgcagcctgcttcctaaatgttggtacattatcaagtggtaagctatatttccttttcatattgtcatatcttatagtggtaagtttggtgtccacttaaaaatgagagtgaaaatttcaggaatgagctatgaaaaaattgtatgaaaagtcattcctaaatatttcactcccaattttaagcacgttaccatactggcaagattacctagatcatctgtctcttacatagtcatgtcacaaggcaagattacctgcatgtaaaatttctagaagaattgcaattatctgtttgatgagttgacttaaaattctcattttctattcttattctaatggtaattgaaatgaaagaaactgatttattgttccaggatgtgatggtgcccctctgcttcctctgctgtttattattgtaaacataggtttcaatattgcattgcttcatctcctcaagatctcttcagctgttgtatcttgtcttgcttccacattttcaggtatgctaattgtttcaccaagcataactatattgaagtttatattggtgaaattactgtatgttactcgaccaacacatgttagtggtcatattctagaaagttaataaaattcgcgtacatattacgtgaagattgatcagaaacatggaaacgttctagtttggaaccgtataataatttctcgtttatatggacatcttgctctaaaatttgtgaaaacaagggagggaagttatgatgaagtatgcttaaatatatttttggttcccaaatttaggtcaccgttggttttggtcccttaaaatttaaatttatttatttttgtcactcaatattgaaaaattatgagacatacccaactaatgcaatttggcttgtggcagtcccaatatccatctacgtgttcaccatgccattgccataccttggtgttgcctcctctcttccaacaggctttatggcaggggccattatcctcattttgggcttactcatttatgcttggaccccttcaaatggttcctcgggtgcttccttctcaacttccacctagagaggctagaatgagttgacatgtcattgcagatagtacaacaccacaaggaactaattcaggttcacttttaggagatggctattagaaggagaaaggaatagtttgttcttgtaagttgtaatagttgttggtaagcatttttatgagctaagctcaagtaagaaagagactagactatagatagaacaggtcccaagttcaatttttgtgtaagctaaggaaaaaagtaaatacagaataaaagtcattttgctgactgaggtctgaggaaatgatattggaccatttggatgcaacatgttgttgaccactaagtaaataagtgattgagtatatacaatttggtaaaaagcactagtacaaattgttgaccatttggaccatttgtcatattttttttttttgccaaaattcaaagtagtactagtagaactttttctttgaggaataactggtagaacttaattctcataagataaatttaaacgagtaataatagttatacataaaaaatataatgacctaaaaaaatataatagaaaactgtatcaaaattcaataatactttttagcactgtaatttttattttatttttttataaaaaaattgttttagtcgttctacccaattgttttttgttcaaattatttcacaatgaatactttgcaaagaaaacatatgtgatgcggagttggataataagaatgcaaaattagaatgagttatcgtgtaaatgactactaattcattagtcatgtaagtgaaatctgtgatggtatttggaatgaggagggactaaaactttcctcaaattaaagaattaaaaaatcaattttaaatttgaggggaaaaaataaatttactttaaatttgagagattaaaacatatttaagtgaataaaaaaagacgaaggattaataataacttaaatatatttttaatcatcaaattcaaatatttttggtttttttcttaaatttaaatttttagtcctcaatttcaaaaaatactctttttaatcttctccataaaaattaaacatcccagtagtaatccaaaatcaatttaagatttttttttaataacgaggaactaaagaacattttttgaagttgaggtactaaaacaaattaaatttacggaaaaaagaaaaaaaaccctaatttgaaggaaaataataataagattatgttgggtaaaattaactaactagaaaatgagttgacggctcaaaaattagttggtagctaaaaaattaatttattaaattgttagtgttcgataaaattaattattagtgtagaatgacaaaaaataattaaataattatttatttaaaaatgataactaaaaaattaaataaataaattaaaaataaaaatgaaaaaaaataaaagttaaaagttaatgttttaaaaaatattattttaaatagtgtttcaaaaaatgttagaatttattaaaaaaacttatttatcaaacattcaaatttttaactagtaaaataaactaaaaactaactaaaatcataacttaaataatccattaataattaatatgattaataatacaaagtgataagaaaatagaaaaaatatcaaattaagcatttgactatttacatgtccatagcatttatttgacgtggagatataaagttaattgggctcttaaaaaagaaagaaaggagaaaaatgtttttaatccattctggtaaaaaactttaataaattaataactaatatttgtgaaattttgctctccatataattagactcttgaggtgtttatataatgaatatgtgaaaccaatgtgtgtattttttcggccagacaaatagcaaatagcaataatagcagcaatgtcaatgttgcgatcagtttgtcagttaagagtgggagtggcaactccaaaaccttgcttccatccctcaatcttcttatcctccgtttctctctctcacaacactcacacacacacctctttccccagaaccttccgtttccacccactttcactccctctttcaccctttgtggtcttcatgcctcccaaagcaacaggtcctcattctgtgcaaacccccttaatgcttctgtttctgaattttgtttctgattgcaatatattatgtatcatcactttattgtaagatggcaaacaaaattttcataaaaagatgcaattttcattaaaaaaatgtttttccagcttcctatggcactggggctagtggtgctctgcaaaccccttaaatgcttcttgtgaattttgtttctgatagcattagattatgtatcatcactttttttgtaagatggtaaaaagaatttcataaaaagatgtaatttttcattaaaaaattctgtcttttcagcttcgtatggcactggggctagtggtgctgctgaaggtgataggccaagggagatattggtgcagcatttgttggtcaaagaagatgaccagaagcttctgttgtatcttcagcagagaatctcttcaggttaaagacaccgagggaattcagttctttttctcctgccaatgtgtggggttaggtttcggaagatatttatttatttatttcaagtttatcattctaagaatctgttgttgtgtgtgcaggtgaagatttgagtgatcttgctgtggaatattcactgtgcccatccaaagaagaaggagggatgcttgggtgggtcagaaagggacaaatggtatgcttttaagattagattaaaccttgttttaggctttactttgcaactttttgaaggcggttttgcctgtttcagatggtattcatcactgccttgtgtaaatgaatctgtctttatctgttagaggaaaatatacagttactgtgaactttctttgggtaggtgagagaagggacaaattagatattatgctttttcttgcatttcacttaactgacgttaattttgtggtatgattctgtagaggaagcagatgaggtagtgatctggttacagaactagaagtgctgtcccccccccttctcccccttaattttactgcaacagtacaattatgtgattgattgaaaatatgtctgatggtgaaaatgtgataggttcctgaatttgaagaggctgcctttactgcacctttaaacaaagttgtaaggtgcaaaacgaaatttggatggcacctgctgcaggttttatctgaaaggtatttccaggcttatgtttctgaattggatgatctaatttgtttaatttcaatgaaaaattattgaatttttggcttttgatagagcctaatggtgtttttttgacccaattagccaacactacctagtgagataatatttggtgattgttgttgttaattccaacatgtgttcttatggcttgtaaatttgctcctttacctgatagggaagaatcaattcttcaagacattcaacctgatgagctgcatgtgaaaattcaagatcccagctttttggacgaggcacaattaattgatgtgcgagagcctgatgaagtgtatgctcatattttcttcaaccataattagttttgaaatgaattattgtttgatcgcatttggttaaatgtttgtaaatagaccaagtgagtgattataagctgatatgatttgcaatgagcttaaaaaaaagtgaaaataagatatatagttcgattgaaagtttgagagcatttcaattttcaatgtttatgcacttttgacatctcaaaggcaacaaggggatctacttttatttgactggttgggatattcatttagtagctcttacacttatttgcatctatttttcttttgttctgcagtttttggaatcttcctaggtttcttatttttattttagtagctgatctgttttttcttcatttaaattacattctcaacatgcacagggccaaagcatctttgccaggatttactgttcttcccctccgacaatttggaagctgggggcctgaaataactacaaaatttgaccctcaaaaggatacatatgtcatggtaagtgcagtttttcttctaaaagatgtcatttctattagaaggtatccaggaaactagaccactaatgcttattgattactgttctctaaattgattgagtatatatctttattgttcttgtctgaaagatctgttcatgttgctagtctcctcctgctcctcctttaatggtttagaggttgtatgttgatcaatattgaaactggaattctttgaataggttcctgcctttgcagtccaagtttgaatttttagaggcctttctttcgagatatttaataaagcaataattttgaattttaaattcattcatctttcttgtcagaatagtttactatttaatattttagtctgtctgaccgctcagttaacttgttgctgcaatgcacaaaatgattaaatttgggtctgatttagcaatgttttttcttttgtgtgtctgtgcattcaatatcttgacttctgaatgcagtgtcatcatggcatgcggtcattacaagttgccaagtggttgcagtcacaggtatttttttttttcccactttttgtcaggccttcaagttcaagtgtgtgtatgtgtgttttgcctcatcatttgtttacttcctgatatcacaatgcaacttccaagccatgcagacaattattgttatactgtaaaattgtatgacttttagacatgttacatgcgattgttgcttacaagatatagatgctttagactgtagacaactaatggataaacagtttcaactttcaacttgatcaaagaaaatctcatgatggtttttgatacctattgttcaccaattttcgtatatggaagtggatttgaccaacttaggaattaattctcatttttcactagttgtagtaaagtggttattgtttgtactttgtaatttaatgattggtgaacttttcagggttttaggaaattatacaatctttctgggggaatccatgcctatgctgtccaggttgatccatcagtccccacatattgatttacattattctgccataaatgtagtcctttacttttccactttccatctttgtacatgagagcaagattttgtgggatgtccatgttacctttaggaattggatttctcttggtatgaacatgtatttactttggatcaagagtaagaggctacatatcaagtgctagtttttgtgaagctggccttggctgtgaggtgatttatgattttcttagcaagtaattgctacttggttttatcgtttttttttttttttttttttaccaagggatctaactcaagttgttttgagcaagtgcacaagttgttttgatttctacagataaaaaatagaaaaatataaactgttttttgtgaccaaattttcaaagtgataaacaaatattttcttgttgataaaaagctttgtttttttcattcgtaaaattttgaacattattggttggctttagaaaagagagaattccaattagagagatgaagagataagtctagattaaaattcattataattctacaagttcaattttctcatgttattttcttgattaagttagttttttccctctaatttatttgaggttcaatttgattttttttagaattcaatttgatcttttaatttttaaaaccaattcaattttaaccttttgtcacgtaccattctcttgcaactaaatgcacaacctcaacatagagaggttcataacacagcttgagttaaaaaagaaaagaagaaccatatataaaaagctgtgtcaaaatgcttagaacgtggaatcaaactttgtaaagtaccaatggatcaatttccttcgattttattaggaatataatatttgcatttttgctgagtatacaaaaaagaactttttgtaaataaagatgaggaaaatagaatacaaattcattcattttttgttacctggaagactaatttcattatgtaacaaaaagactaatttcattagtttaagagagaaaggtgaatttgcttaatatttgacaaaaatatctatggaaaatctgtttttctcaacctttttttgagttttgctaagtaatttccaaatctttaaattttctttctctctcacttcctgatctcgcagtttgctgattgtttatacactgcgtaatcctccctattcaacatgcttccgacaaattacagcttttgtaattattatgagaaatttcgggtaaaggatttggtattattgatgaatgatacgacatccaaaacaaatagagagagaacatgtatgagaacataagtatctgattttgaattaaattcgtcaggattatagattatttttagataccgattattttaaactaaaaagaattgaaaagaataagccacgtcgcggcaaataatctaatcattaagagcttatggtatgagaccaccacagatgaaattgtttcaaatagacagtactgaaataatcttatttattaaaaataactagcaaattatcataagtttccttcctcaatttaactaaacacttccaattttcaacataagttattatataacaatataagttcaaataagcttcttaagaacttttaacaaagtcatataatatttttaacaagatattacattatgagtttcatcacttatatgaatatttttaatgaaggtaataagattaaaccaatattggagcgactaataatacatgacttcgaattattcttacttattttttctacaacacattctttttttctatcactttccatcatactatttatcttatgacatatttctcttcttatgtataaaaattgttaacaagggaaatacaaatcataagtagcatagttgtattgactcaaattgaaaagaagatattcaagactattgctcatcagacacgtttagagttagcaaattttcgctacaaaaacaaaaactattagtatgcgatgttagtaacaacttgcaaaatctttgaactgagttgttccagatcctttgacctgtaataatagaccaacaaaatccatttttattcccctctccgaaaactcctctccacccttgtcctaataaaactcttaaccttccaaagcaagagactcgccaaagactctttccaatttcttcaatctttccaattaatgcctccctctaatattcttcacaaccctttttaacaccctttcaaatttccccataccttttttctagacattttttttcctttcccaacaacaaacacttttcttcatgccaacaccttctctccagaaaacaacaacaaaaacattgttgttcagccctcaaaccgcaccaccttgacctatatctctccacatatcccctttcccttccttcaacccttgtgttcctgttctcccttccattccaccatgggcaactgttgctcaggtggcaccaatggcactgaggacaagggagaacccaaccaaccaaccaacaacaacaatggaggcggaggtggaggcagaggcacaaccgcacccataaccaccccaccaccatcatctaagcccaaccatcctccttccaagcactcgaagccggccgcgatcggccccgtgcttggaaggccaatggaggacgtgaaaagcacttacagcatagggaaagagctagggagaggccagtttggtgtgacacatttgtgcacacacaagagcacagggaagcaatatgcatgcaagaccattgccaagagaaaattggttaacaaggaggatatagaggatgttaagagggaggtgcaaatcatgcaccatctctcagggcaacctaacattgtggagcttgttaatgtgtatgaggacaagcaatctgttcatttggtgatggagttgtgtgctgggggtgaactctttgatcgtatcattgcaaagggacattacactgagcgtgctgcggcttccttgttgagaaccattgtgcagattgttcacactttccattccatgggggtcattcatagagatcttaagcctgagaatttccttctcttgaacaaggatgaaaatgcacccctcaaggccaccgatttcggtctctctgttttttacaagcaaggtcaatatttctcacccagaaactcttctagttttgcttctttctttctttatttattatcatgttttattttattaaaaggagagttagtttagcttccgtggaagaacgtgcatgacatgtttgttttctagggtcatggaaacggtttgcttagcatggaactaataattggctcttctgtcatgtttttttataattaaattccaccatgcgtaaaggttttttaataaacagaatgtgactgcaatttgattcaagatctttgaaatttatgtgagagtgtgtttggatagagcattttaaaatttcagagcattcgaaattaagggaaattgaaatgcatcaattaaaattcttggatttttaaaattccttgtttggataaatcaatttaaattcctttaatttgaaatttcttgtttggataaaacaatttaaatttctacactgagcattttcaataaaaaaattttaacttgagtttgttaagttattttttgtgatttctaaaatgtcctaagtaagaaatttatatacaattttactaaaatgataagaaattttaaaaaactcacttttatattttttgaattattaaataattaaatacaatgacattaaagaaaaaaaagttaaataaatacatatttttattattaataaatagtttttttagaagatacaagtcttattttaagaaactctcactatcatatagatttgctcgaataaaaagaaattgcaagaaataaattcttcacttaaaaaatcctccgaaaaaatttcatccaaaatattctaagaaatcatacaagaaacagtttcgtctacaacatcaagatttttggaatttctgtgattttattgattacacttgtccgtagttttttacaatataagaatcactacaaaatgtgacaccaatttaaaacttttgtagtagatattgataactcataccatcagtgccaccttttaatagaacttctttttgatttttatttagagtttttttgctataagattgaatgtgtgattaaaaatcaatagcttggagattgcttaagctatatgtaaacagaattatcaatatatttgttgcttggaataatcttaggatgataacacaatcttcaaattcgaatgaagcatactctaacatggaattcatccctttttgacaggagagatgtttaaggacattgttggcagtgcatattacattgcacctgaggtcttgaaaagaaaatacggcccagaagttgatatttggagtattggtgtcatgttatacattcttctatgcggtgttcctccattttgggcaggtttgtattcatttactcaatcttaaagctacttcttagttaacaaaatagaattcttcttaaattgatggtatatatgcacaatttgaaactgaaaccaaaacatatggtttgacagaatccgaaaatgggatattcaatgcaatcctacgaggccatatagactttacaagcgatccatggccatccatttcacctgcagcaaaagatcttgtaaggaaaatgttgcattcggatcccaggcagaggctgacgtcctaccaagttttgagtgcgtataatattgacttcctttctatgaacatcttgaattcaactacgaattattgatttgcaaattaatattactttagcccagacaaattggttcaatgcaattctaataaagccctttttttattttatgtgaaaaacagatcatccatggatcaaggaggatggagaagcaccagatacacctcttgacaatgcagtactgaataggctcaaacagttcagagcaatgaacgaattcaagaaagttgctctaagggtaatgctattttagctttctctttattcttcgtgcatatttacactatcgtgagtctagttagaagtggaaaaacaaactaattatcctgatgcaagtcacagattataataaactgcgctagaaaaactgaaatttacttcagactcaagctcagtttttggcttttgtgagttaaatccggaacgggtttagatcatatcggacaaaaaaggtctctttgaatttgaatttaaaaatcaaatcttacatttcatcggccgagttcagatcgaacattattctacccattgtttaggaaaaactgtatcacaagactcatgaaatagtgtagtattaaaatttatatattaattaattaatgtgatgtgaaatcaatatatgagtataggtcatcgcaggctgcctatccgaggaagaaatcatgggattgaagcagatgttcaaggggatggacactgacaacagtggaaccattacaattgaagagctcaagcaagggcttgcaaaacaagggactaagctaacagaacaggaagttaagcaattaatggaagctgtgagttatatctccttttcaaagtactgcatatgacaaaataacttcccatcagtaatttctctgatgccattacttaagactattttctttattttccttctgtatattataggcagatgctgatggcaacggaaccatagattatgatgaattcattaccgcaacaatgcacatgaaccgaatgaacaaagaagatcatctttatactgccttccaatactttgacaaagataacagcgggtaaagaaaaagcaactagattgaatatatatcagccactcctttggaaattgattggtgttaagttgtaggttctaatctcattgctttgtcataatcaggtacattaccattgaagaattagagcaggcactagttgagtttaacatgaatgatggcagggacatgaaggaaatcatttcagaagttgacgcagataatgtaagtcctatactggatgaattaaatactcagttgtaagaggagtattggcaccctcctgctaacacattttctattaaagtatttaatggtcaaaatttatcaaaaactacaaaatcataaaatgaaactcattaaattaattgagacccagaagaaaattatgtgattttcaataaattgcaatctataataaagaatgcattgctaacacttctctagtttgaatacaaaaaactttctatagcatatgtgcttaacaattagcatactactgtacagcatatctgaatcatgactacgaaaaattctgaaaaacttgtatgtctgtgcaggatggccggattaactacgatgagtttgctgcaatgatgaacaaaggaaccctagaagttggtaccaagaagaggcgtgactcaaccttattttagttggagacagtgtaaagatatttaacaggcatcatcatctctttaagcagtgtcaaggtggaaaacaaacaaatttagagggggaaaaaaacttaaacaaacctctgagaaatgttaacatatgctaggtatttgattggttggttttggtttttacttttccttttcttatgctgagaaacattgcaacaaatcttgtattgtaatcactgctcacttaggaatcaaatcaaaagaattatttatttatgactgaatctactgattccttttcaacactaggttcaaatacattcattattattattaagtttatatttttattacactaggctcaccaaaaaaattcagattaggaaaacagaaggataaccatcacggaacctcatacacttgacttgcagaaacaaatttcattgattctcattcaagattttcaatacgaagatgggaaacagaacattgagaaagaaaggaaaaacctaaatttaccaaagagaaaagtcctacaaaaagctgggagcaacaatgttcgagtccccccacttcagatttctgaaaatacaacaaaagaaataaccaagaaattacccctgtattgtcatccccctcttttttgttcatctctctctttgtttcttccctctctccccttgctaactctctcacgctggcagaagcataaaccataatacattatataagctttccactcttgaaactaaagctgaattcagctatgcatcgatattcaaacgtaacatcaacgaaattaacactaattccattcactacaaattacgttgtagagttcgaagcaatgttcaattcaattcactcaaggcgtctgaatcgcactcgaagaaacatcgccacaattgatcttaaacgtttatactagtattcaatagcaactcgaacaacgacataaatacagagacgagtttctcgaaaacccctaactaacaaccacaaggcattgcatctccaatgaatttatatttcatttcattctcacaaataatgatagcatcgtaaacattaattcatagtcacttatactaaatccaacaataataagaatacaatataaacaccaaacagagtctcgaaaaccctaaccctaaccctaggcttttccgagaaggaagtatttaattatttatctttggtggagacgccgtacttctcctgcatgcgggcgatctcgtcctccttcttcttctgatcgaacttcttgctcatcttcgcttgctggtagtagagaacgatgaggtagcggttggcgacgttgaagccggagaggtggtcgacggcggttttggcgtcgtagatgtcctcatagacgacgaaggccgttccgcgagtgtccttgttggtgccgatgcggatctgccgaatggcgccgtacttgccaaagatgtcgtacatctcctcgctcgtgatgttgaagggaaggttccgaacgtacagcacgcggttcacctccggcggcagccgcgtgttccctttccggagactgatcgccgccatcgatgcacgcaaaagtcagggaaaattcgagagagaagaagagaagtaaccttcctgttagtttgttttctgtttggttgggctcggtttatttagtgtcattgggattttctttctacatctaccatatttcttagtacacccaagagaggaaaaatcgaaaataattgtcaattcctatgggcattgcaagtatcaaacatgccacattctattattagcataacactttaatcaattaaattaataaatcaattatattaaaaaataattaatattgtcatatataatattaaaatttctaataaattttataataattaattatttttaatataattattctattatgtggtattttgagacctacatgaatatctataaactttatgaatatctataaactttattaatgaaatctgactgcgttcttaataaaattggatttaattccactctgataattgaatttaattccactcagaccagagtagttgttggccgctccagttaattaactcaatccttaggtgaatgagattatacttaaaacagtacctttcctaatagagctaaaacagttttttatatatcatatataaaaaaatatgtcaaatatctaatattttaaaaagacacaaaaactgctaataggaaaattttaaaacatgaaataaataaaaaacttacctttaattttgttgagaaaagactcattgagaatgagaagtctgttccggataaaataaacaaagttctcaccatataagccatcaaagaaaagaagaaaaaaaaacttacctttaactgaagtgttcgaaagcacaatccattattgcaccgccattgcaacttattttttgttctttccagcagcgatccaaacagaacaggctcctcgttgactgagatagcaactccgacacttgagttgagtgtgtctggtcggaacagtatgcagttcagtatcacatcacaattccttcatatcttctctcttaccttcttcattatcatcacctcttcactttcacaatccaaccaggttcacttctctatcttatcttccttttcctacatattttaattttgcactatcgatgtacaaaattttaatcagaatagatatgatttttaagttagttattgtaaaagtcaacggacttattaccgcacatacaaaaattgtaagtgaatgtcagtgtagaatccgttacactgattttcttctcttctgtgttgacctttgctcaactaatttacttatcccgttctacgttatcaaagagtcagagcttcgattcttgagtgttttaactgggtatgatcattagtactgattactgaactgagatttttatttccaatagttctatgcttgattttctttttcgaatgatttagttttgtgatgcgggaactgaaattccatcatccaagttgttgatcaagggtggcacggttgtgaatgctcagcaccaccagattgctgatgtttacgtggaagatggcatcattgatgcagttaatcctaacatcagggtaattgatgaattgaaaccccctagcagtaacagtgcttaatttgctttctaacaccttgcgtttttgttactttctgctttctgatgtatgattcatttccattcccaggttggagatgacgtcactgtcattgatgccaccggcaaatatgtcatgccaggtttcaacctattcaattatatttcatcacctattattgttagattaaattagaatgcatgagctggtgtaaactccttggtaactgtcttcgattcctatggataaaaataaataaattagaatgtgtggatagtatacatattttttaccctattatctcaacctcaaatttaagatagcatcggaccaccctatatcgggctgttgtcagatcataaatgtccaattttgtacacttcatgccctgttgactaacaatatgacaaaaatagtatataagtggagagcaacccattgccatgtatgctaattttgatgatttttatgataactaattaaaaaaatcataagtcgaatgatttctaattggtaaacaatgtaaaaagtgcatgaaaattaatttatcatcatcatcgtcatcgtcatcatcattattgttgttattattatgtgcctaatagactctatgaatgctccttttgttaactgaccaggaggcattgatcctcacacccatctagatatggatgttggttttactgcaacggttgatgacttcttcagtggtcaggcggcagcattggctggtgggacaacaatgcacattgacttcgttataccacttaatgggagtttgacagctggttttgaagactatgaaaagaaggcaaagaagtcttgcatggattatggttttcatatggttattaccaaatgggatgaaactgtttcgagagaaatggagctcatggttaaggagaaaggttgttatttattatttccttgctgcattttgataatttggttgattaggtggtagtaaccctttgggtgagttgtaaggaatttattccaggtagtacatctatgttttgtaattgcagggatcaactcttttaagtttttcatggcatacaaaggaattcttatgatcaatgatgagcttcttctggaaggatttaaaaaatgcaagtctcttggtgccgtagccatggtccatgcagaaaatggagatgctgtgtatgaagggcaacagaaaatgatagaacttggaataactggtcctgaggggcatgctctttcaaggcctgcagtggtaatttctcaattttgttcttttaataaagaatttgcagaataatggaatgaaaatattggacattttttttgtttcttttcatcttcattgtctgaccaacctatagcatatgtgaatgtgatttgaactcatatttaaaatttcccttttcaacttagtaggctccctgcataatgaattggatttaggtgctgttttaagctactactatcaaattttgcttgcttgtgaccaccctagtttgacatttgttgtgttcagctttcatctgttatgataaactcattaaccatgtttagccagtattttatcatcttgattacatgttttgttctcttatattttgtgatcactgcaaattttaaatgtctgtctgtgtgatttatagaacattctcccatttgactttgttatctgtgtagttggaaggagaggcaactgctcgtgccattcgcttagcagattttgtgaatactcctttatatgtggttcatgtaatgagcattgacgcaatggaagaaattgcgaaagcccggaaatcaggtccttcaatatttctagtgttagtctcaatttttattaatgtatgcattcattaagagaaagtagatgatttatagcttataaaattagtgatccttttgaagaaaaactaatactcttgcaatcttttttagggagaaatgcaaaaggaagacattttgattgaatttataatatccatacattggttaacttgagaacaatttataaatccactcgtgttttactgttgtctctactctatcatagagtgtagaaactgagggcaactcaaatcacttgaacttaattgagagtctgagacttaattttgattgctgtcttgtgattttttttactgttttcagttacttatgtaccctttttctctgtattttgtacttgtgacaagagcttcctgaggaagattctatttttgatacaaagagactggatttccttgctgctttgtctttattttttcctatctccttgttttgtacttctcttatttggaggagtacttatcctatccctaggtgtactttccctctttccatgcagtcctaaaaaaaaaaaaaatcactgatgaactgaatctctatgaagatgaacaaaaggatctttacaaatttccactgtgatatttgaagtgttattgttccttgataacttagtttttgcaataataaggtaacctgttcttgtgctgcaggacaaagggtaattggagagcctattgcctctgggttagcccttgatgaatcttggctttggcatcctgactttgagattgcagcaaagcaagtgccttcacttgtttcaatgtttttttttattgttgttcttttatttccttgaattttaagaacatataagccttattcattctcatgtttcaggtatgtcatgagcccccctattaggaaacgaggacatgataaggcccttcaagctgccctttcaaccggcgttttgcaggtttcacattatgattcaggcttaggttcaataaccaattaaagatgagggtttgagtttctcaggatagtctcagctatgaaatacacccttcaagctgccctcagctcaattttattcgttttacttagattgtttatttgaccaagggatacctttttaaaatttgtagctggtaggaactgatcattgtgcctttaattccactcaaaaagctcgtggaatcgatgactttcggaaaatgcctaatggtgtcaatggtaatcacatgaaagtcttggatatttgtggcctaaatactttcttgctgattttgaaatgtttccttactgatatagaatgcaacctgtaggtattgaagaaagaatgcatttggtatgggatatcatggtggtaagatgtcaacttccagcttagccctccctttctgtttaggtcggggtaaaatggtgaagagtataaccttttagctagaacttatggtttatatatctcacaggaatctggccaaatatctgtcactgactatgtcaggataacaagcactgaatggtatatattcagttaatcaaagtgcaaattagcttccagttcttatggcaataaaaaagctgtttggtaaagatgcccaaagtattactgatgtttttcatttctacaaacatttcagtgctaaaatcttcaatatatatccaaggaaaggagctattctcccaggatctgatgcagatattatcatcctgaatccaaattcgagctttgagatgagtgcaaagtctcaccactccagactggacacaaatgtctacgagggaagaagaggaaaggtaccggtttaactataatctgttcaacatgtgattgtttgtgtatcgttcaacaattgaagccttgtcattgcaatatcaagattcaaagtttttatttttctcagggaaaaattgaagtgactattgcaggaggaagagttgtttgggaaaataatgaactaaaggtcactcctggcactgggagatacatccaaatgccaccttttagttatctgtttgatggactggacaaaaaggatgtcatttatctaaattcccttcaggccccagtaaagcgagccaaagcctgcacttagaaaatttctgatatcttttttcagtcaaatttcaacatttgacatagtggaaaaaccaagatgttaatccagttctgtgcaaataaataaaaataaatatatttcgttttaccttttccactaatgtacaattgcatagattgtgtcaaaagcaattggagaaaaataaacaatagttttagctaccacgaaaatccaagtggagggtctgaaattaaactaatactgtaaaactcaaagtagttatatgtaagaagatattagtatcatgaccactcaagaagtaatttaatgtgtcggtctcgtattctaaggaaatggtaaagtatgatgatccaaagtataatagctataaccacaacgaatttattggattcgattacgttatggtcaaattttacgagaatatttgcatgagcattcttattcagttccacagatgatgatggaaattagtgttagaaatattgtaatgtagtctagtgtatacatttgggtagcaccaacataaaatgtgccttgaattgactccctggttcaccgtatatcttgggctaaaccctaagaactgaacctgctgtatggcattcttctgattgcatccaatttctattgaaaacagaaaataagttttcaatctaaatatattttctctgtttaattaatctggatcctacaatttgtctcacattgagttttagtgattattatggacagcaaaacaattctcataaatatttgatacaattgcatatttaggatttaaatgaaaagtctcttattaaacttgaataatctcaagtcaagatgaattaagtctttatatctaaaaaaattatgtttttttttctacaatagaaattttatgttttaatccttgttctgttataatataaaagatataagcattaaatcataaaaaataaaaaatgtttgcatagagaccaaataattaattaaatttttattattgttgtttcgtagaaattgaagatttaattaggaatttataataacttaagcattatatttaactaattgggttagacgataattaaactttaatttactttgatttaacttattttttaaatggtaaaaaattagaaataaaaaaattattttagaaaacaggaacagaagataaaaatgaattaaaaaaaaaaaatctcaaaagaaaaggttcttagttcttacgactacagcgcaaaaccctcgagctcagtgggctttggcgtttcactcagtattttcagaacagaagtggaagcacgttcgggatggagccggcattgttattagggtttgaagaagatgcgaaggtggttacagagtcatcatcatcgtcatcaagcgcacatagattggtcccttggttgaactgggatgagtggctattcgttaaaaatgctctcttctccgattctcctcactctgtttcctccggtctcaaacgagtaactttcttaaccatacaaattcataatatagatagacatagtactgtaactgcaaacctagcctaacctaaccatatgttctgctctttcagatatccgcatggcgaagtcgaggttccttgccagttctcatcgaagtcactgcttccatcatcgaaattcaactcaaagacccatctttcaggtaaccctaactcctttccttatgtatgtatgttgtatgtatgtatgtatgtatgtatgtatgtatcaatgtatatatgtactatgtatatcacaataagcaattttgtttgatttaattgtagacatgatcaatggaatgaagcttctatttcggaggagatgcttgctatgctgtattgtatggctatcatgaggtttgctcagtggtcactatacctttttttatgttttttcttcttctcactaataattttttgttttattttaatttttctatttgaaagtataattgttttgatttttcaaggcttgtgaatggtgttgttgagaagacacgcaagaaagaagtggcgtcgatagcagtggcagctgatgcgattggtattccacgcatgctgattgatattcgccatggtgaacaagtttccttttgattcctgttaattattagttttgttgtgctggtagaatgagacacgatcttcattatagtcaaagaagttcacttagttgcttgttttattgtgtttatagtgccctgctttttatcttatttattgctgtaattgcagagggatcacatcgtgagcttccttcacttaagattgttcgtagtgcttctgttaaggtatgactcatttcgtggtttgtttgatcatctgtctcaacaatctttttgcttttttgtaattaaattcttagcaagtgtgtgtggaccttggttggggttacattcttagcattcaggaaattattagactgaacttttctttcccaaagtctgtgtgtaacataacattttttagtatatgaaatagaaatcatgtttctctgttaatggtatcaaaggacagagtacatgcatggtagtcactgaaatctatgctatttggcaacagaaaaattattatttttgtttgtaataacttttagattactctcttactgttgtacattcatttttcgttctgatgaaatttcagtttgttgttaaaatgtaactggaaataaaaatggaaggcatcctggttttcttttgtggatttagctatttgaatatgggcaatttcttcataagttcttaacatgtatggctattcccgtcacactaattatgtttaattcactccccaaactcatctgatgttttgctaataatttcaggcacttgattggttaaaatcttattattgggaacctcagagcaaagcaattccttttcatggtgaaggaatagcaaaagtcaacaaagaaattaagtctaagattcgtgaattagctatctgcttgaaagtcaatgggagtgctcagtctagttctttactactaaaagcaaaacgtctgtaagctttgttcattttgatcatattgtgactttaatcattgtcttgcacttgtttattttaagtcaaatactttccttccacctattcattaagagttctattttgtgttttcctattttccgttttatttatgtacatgaaacttgtgcacatgggaaagcatgtaatttaatgttgaaacttgaaagtccaatttgaaaatcctttggcccattataaagtgtggtaatggtagtatatggtaatggtagcacatgtcaaggcatttttcaattattaatggatgtagagttattggtgtagtatcatattcaaatgtattctaagtctagacagtatgggttattttgttggtaagatgacattcaactgcatatttttcctacaattcttatgatttgttttttctcttttaaaggggtcaagcatggtgaattgctttttgggcgtaataagcttttgtctcttatagttggcaagagtcaaacatcacgaaccggaggtatcattttgttcatatttcttattacaataaaacatatttgttgtgtttgtttagtatacctgttgtgaaaaactgccccagacagagaaatttatactgtgcaaaactaaagaagaatttctttaataagaaaataacaaaattacaaagaagaattctctatgaattctttattggtagaaaatcaaggaatatcagtggctaattattatgaatatcatcagtttatttgtttccattatttcctttattaggattaggaaatatgtgatctgatatgttttaattacagtaggatgagattattttccttattacttattatttagtttccttattttgtaaacttctttcactataaataagagtattttgtgtagtcttagatgacacacaacagtaaataattcacacatgatatcaaagcaggttttcgttcctaaccttcagcctaggctgaaacttgtttctcgttgtctatgttcttccgctaacggctctattgctctccctccaacaatgggtgactctaaaagactgtaaggaaggctcttgcattttctgtgaagctcagcagcatatttcgcgcttcccaatggggcttgcattgggagttaatcatcttgaatgagtcagactctaccctgctgattttcactataaataagagtattttgtgtggtcttagatgacacacaacaataaataattcacacattatttctcacatgtgtgctctctaaagtatttgtatccttatgttttctcttaatgaattgaatgttacaaatcccttgcacctatatatactaaaaaacaagctaaataattataggtacaaaaacactctcatcctcaaccattcgtatgagtgttttacattaactaaaccatgaaacaattaatggtgtgcaagggatgaagggcaagtcatccttcaaaagagaagtaaattgtgtctaaaggccacataacaaaaaataaaagagaaaagaaaggatgcaacaccaattgtgtctacttaacctctcttaaaggatagtgttttcttggccaatttgttgggtttaaatcacaggttggtttttgagagttcctatgtggattatgctaaaagattggtttaccttgttagtgggtgttctttctttctttattgtgttcgttctgctttaagaggattcctggccatttcatatttttatgtttctattttttctttctttaaaactcaagtgttgggtttccttaaagctgatcgaccaaataaatgagagattcctaatctgagatattggatatttttattttactatgaaaaataagtgaaactgaaataatttgttttagagtatcttcagctttaattaatgtttcagggtattcatgtactaattactagtgaatcgtgatactttcaggatctaagaaacaaattaggaagatcttgaaatatgttcttcggttatattcctccttttccaaagagattgtttctgtgttgttggagtatttgttgaaagctttaagttcctcagagttggaagagaatgcagatgatgcttcaattggtctaaccactcagaatgttttggctgattggatgcttgtcatactcaaattgtgcaataaggaaccagaattacttctgaaccttcttaaggaagtccttgatatgattgagagtcgggaagatatgaagtataaagaaggttggtagcaattttttccttctacagtatcccttttcattatgtatagtttctggttgaaatttaatatctgtttgttttggggtacttgggatgtatttttcttgtgtgcttttgtcatttgatgccccatttatttacttattaaatgccagatactttctagggctttttaaatgcactactaatggaaagtcttttctgattggattccctttagtatttcttctgccttgagccaacgtgaagtcagatattgagttttaaatttctcttgtccttcattttggtttggtattacgcttagtttcttctttattgttctcatggtgtgttttctttttaaatttttgtagataacccaaatatgggggtttcacactcgagaacagagtttcggctttcttctttgtttgcatggcttgttggaattctcagtaaagttccttctgcagaagcaaatatgccaaaaagagttttgcatgaacttcttcgtagatgtcttctagtatcacaacttttcaacaagcagctcgtggattcagcacttcagcttgcagagctgatgaacgacagctacttgattgagaaagttcgaaagttctctcttattagtttgtccaatttagagagtgcagatgatgaaagccctttattgacttcaaagaacattttccaatttgaggaatccatgctcgaagcagctaaaaagctagagttagttaaacaacagataatgaaaaataaaaaaccaatggcaatggattgtgacaccgaaaaatcacagacttggactttggcaaaatcatggaacccgtgtccaattggcatgttgccccgtgctgttgggtcatctggttgtcttcctgttcttaacattattgatgatgaaaaacagaatcaagtatcatcttgttgtcttcctgttgatgacattaccgatgatgcaaaacagaatcaagtatcagaaaaggaagagaattggaaattgaccccacacggtgccaagagagatgcctttttagatctcctgcaacttgataattcaactgtcaagaagatgagggagaccaaagaatttagtgaattaaacaatgaattgccattgcaaggggagaaaggatgtcccatggtaggcggagtttggaagaaacttacagaagaagagctactagtcattgagtcttctgtaaggattttagtttaattcatacttactgcttagttcttttcaagatttaatccatgttagttttttttattcttatttgtttgatttcttttataaggtatggtacctatatgataacagatggctggccttaaaatatgcaattccacaaacatagataatcctgtagcttaattacctgaaccacattcatgcaataggaatttcattctacattcttttgcccttctccattttcatttgtgctgagtgcattcgcaatagattggaattggatgccaatgctgtatcatggtagagaaagttcggcaggggcgacctgagaacacatgagctgagtcacataaaaggtcacaaacaaatatgcttgtaatctgaatctgcttcatgtggtctcaagacgaccctgtagaaccctctacctccacatattttggaaatgtcttcgcctaaactggaacattggactttgaataatgtttttatcaatttgatgagtttatccaatttgataaagtagatatatagcccttgcaagcgtggtacttctaggcttagatgtactacgccgaagtacttttattagtaatgaagggatctctgttccgttaagagtacaactttgtactactggttttaacacaaatctaagacgctatatagcagtacaacttcccgttgctaacacacgtcaatgcacttttgtcaaaactaaaaagaaaggaaaatcgaaaatgcatatgcattacgatgatttaaaataaattttgtatcttacagaggttgaattgtaacaaaaaattatttaaccaaaaaaggtgtaatttaatttcaaatatggctcaaatgtcttaaaaattggttgtagtttaggtgcgcaagaatataaatttactttcgataaagtgagcgtttatttcaacaggaaccaactagtttctattatattatacaaatattctaaatatagataaaatttaaaaagtataacttgaaaggaaaaaatatttaaaattataaatgatattatgcataattaatttaaaattatgcatagtcaagaaatatacattgaaagaaaaaaaaataaacttgtaacgaagcatgtataatttatttgaaagaagaacagttaataaggtgtttttttttttttataaaaaaaaagaatgaagacttgaaattaagtttttaagataatgtactctaatttaatatgagtggaacacttagatttgagaaagaaaaaaatttaatgtaaaaactaagctaaaaaacaatgaatatgagaatataagtagtaaaatttgaggaaagaaaaggaaatttaatgtaaaaagggacctaaatatatatatttttttgtgtataagtaacagagatttaattcatatatatatatatatatatatatatatatatatatatataaagtgctgagcgatgatgaaatcgtatatctaaagaaagtacactattagattattttaatccaaagagttaggactttatgttaacacacggatggataatgaagaatatatcaaaaggaaaggatctaaatatattatcattcatcttttgttaattgtcttcacttttctctctaatgttgttttagaagaaaaaaaattacaagaaaggaaaaaaggagtcaagtgttttatcccgtctccaaatggtgtagcccataaattatttatatgttaaactcttaaatataaaattaaaaacgtacaaaaatcaaaatattggcatcggagctaaattcgaacaattgataatcacgaggaattaaatagcatgcctactttgcattgcaaaaatgcattacggcattactttgactgtgacgagggaaaaaaaataaaggaaacaaagggtacctaagttgctaaagattagagaacaaaatgtatgcatgcagacatggaagagagtgaaaggttaaaagcctatgaaatttccctttccatttacttttaaatacacgaccatatggctgaatttttctaatgctctttgctttctgtacactgcttgacctaaattgttgtctttcctaggtagaaagaacatcatgctcctctctccactaaccatcactttttcaccttttatcccctctaaataacaaagttcttcagagaaaaagagaaaggaaaatgcttggtgttgtgattactgcttctgacaataattctttagtcatattctaaaccaaacccactttcaataaagaaacaataatattgtaaacatatcttaatcttagtgccgttttatttttcttacattaccaccttacaccaatttatcatcatttttacgtgaagaatgtaactatgtgcatatatacaatgtaattaaaaataatgaaattaaaagaataatgatatataatcaatcacatttatagtattttccagtggatactttttcaatgtaaagaaagttttgcgcgataaaataatattttatatacatgggacctagttaataggaaaagagagttatacagtgtgaacgtaacaccactggctagacaaatgcatgagaggtaatgatgcaaaaatccaagtaataggaacaattactttacatataaatggttgatagactaaagcttgtttgcattgccctccgcgcatgtgaattttcatcatttggctgagatgtggaggtgaattcttcatgttgtaatgaagcactccttcgcaggaagcacatatatgattcgtatgactttattaaggtagaaaacatcaaatcagaaccccccactaagattttcttttcaaaaaaaacaaagaatagtttctcgtccactaaggatgaggatatgtaagaaaagccagtgcagtatatataaaatataaaccacacatgatatatgtattgacacatttttcattctattttattatgaataattgtattatctgcattcctgccaatgtttaccttattagtaacttcgccagaaagaacaaaaggaaaagaatgaaattttgatatattattcaaattttctcaataccaaagaatatatatatgactcaaagcctctcgactacggtaaactactgctaattaatctttattcttttagtttcttaattttattacaacaaagaaaaaaagaattggatctaacttcctcaacaaacgtttgatatcatcgtccacatcatatataacttaaaatcattagtttatgttttgttttgtttaactgaatttgaaaaataatgaagctgagttcagtagaatgaattatgcatatgtagtactatacatgatgcaaacgagcctgatcaacaaaatcatattttgggctaataaacttcaaaggttttttatgcattaagttgatggttatagctagctatcatttttctttgtaaggattgtttattccctccgttaaaaatacagttgtgggtgcatgttataaggggttcaattcctcaagtatataaaagactttgtttggagagaaaatattcactttggtgatttttacatttcgaaggaatttaatctctgactatcggttcagagatacttagcgtaaaacaaaaacaaaaagtatggttattggtcttcaaagctcttgaacttccaaagatcgaacatatatttaagaagagccacagttcctgttcttcaaatttcaaaggagaaatcatgcaatttaacctcggtcttaacttttacaaaaaccactaagctttcaaacctcccctttttgctaattaatccaataatagtcacttttggaagcatcttcttctctattttaatttagttgccacatgctgatcttcacatgttatgcatttagatttgtgcatgatacataaaagacaaaactctctctctttctatctaaaaaggcatgcagtgggtcacatggatggagatagatcatgtgatgcaacaacatatattgcccatttttactggaaactggaggtgttgctaatattaacttagaatagaatcttctcattattgagatatttatgtggacctttcagattcttagcagtgtgatgcagggtattttagaggcttcctagctatactttgaccaccaaaaattcaagactcaaaaagagatgcttggatgagaaaatggagctagctaagtatctcacttaatttcaacacatacattttcaaagcaaaagtgagagagaaaagaagagtgtggaaattaagaaagaaacaaactagaaagaaagtgatgaatgtctccaacaatggaatccagagctagaaggttgtgcacaacattttcttccttctctaatgtaattaggcatagcattgaaaattgaaattaatatatatatatacaccttatctggtcaaattacagaagattcacttatataggaattgtgcagtgtatatataaatacattattccatgattgatgactagaaggagctacgtcttctatatgtccaggtcacgggtgtgctttggattgtacaaaaatgaataaaggtcagaatgttctaccttgaaaactaggtacgaagcactttgagtgtttacaatttatataatagccttatttctattatgttctgtagttatgtacaggaggcaaactttgacatatagctgtagtgggaaaagatttaaaatggtgatcctcgtgatcacaacccaacagtgatccccacaaatatccctataaaagaaaaaaaggtatttcttcagaaaataaagggcgggatggacatgatatctggaaaaaaaaaaaaggaaaattacaaccacataattcttgaacagtgtttatcttttctggtttctgagacactacttttctcaagctggaaatcaaaaagtcatgatttgggtgatctaagaaagtttctatcccatcaatccttattagtactttatttgaatgggattgttgaagcatggatgagattaaaccaaagaaggaagaacagtactactgatcctcacttatgtgtaaatgataatcttgaatgatcttgctagatatgaatatctgatgatgaaaaataaaaaatagtgccatatgcatatagtttcatgtaacattttatagtttagtttatcttctttttttatctataatgtgtagtgatgtgtttcaacattcaagtatcatgaaagaatcattattcaaaaataaaatggcttgtttccttatagtcatatacttcctttctgacttctaaatattcattttggatggaaattttacataggtatcattcaggggaacttatatatatgattgaaatttaatacaaaacagatcagtccaattagcaaattaattctcaattacagatgccaaaaagcatgcgaagttgagaatacctcctcttttattggaaaaatatatatattgcaaagcaggctttggttctagtttccaagtaaagacgagggtggaggagagggagggaccaacaaattgaacaacttctgacattcatatataatagtgggccaatgaatatacataaaagtaagtattttctctttaagttggaggactatcgcaaccttccaagtttcagttccacacaatagtatgtgttatacagaaagaaatacttaaaatatcacctttctatttaattattgttctaggaatttgcggaggacatgagatctttgtatccataaaaaatcactgtattatgcagtctttacaaatttttttaacttcaaactcaaatgaaatgatctaacaaccccatacacctctccaaattttggagaatatcttataaaaatatatcccactgtttttcctccaaaataaaatagtaagtagctcacatctctagaggaatcacaacccaccactattgcatccgagaaaacaatcaatagctaattaatagctcattgaatcttaataattatatcctatcctagaaaaatacattgtttttacagacatggtcatatgcttcttaaatttagtaaacaacagacataatagagggggtaggacaaagaatagttatttaagaaatatgtcatatgtttctgttgcataaagctgtaaaattataagagtaatgatatatgaatatcagcatagttagtgtatacacttagtgaacactttttatttcttttatctttcttttcttatcacatcatattaactatcatatttacttttctctttcatttgtctctatctctgtctaagtgtctagtagcacataagtgtccatgcatcatttttcaaattataatatgatagagtgagagaggttctttaaaacttggtggtgtgcaaaaagtgaatgaaaaggagagtaccatcaaagaataatattggaagcagctagccctctttggtaattcagtgatggctttcacactagacaggtgtgaagatagcatggtgttcactatggaatctctcaagtcagtgcctgctccctttttgacaaagacataccaacttgttgatgaccctcgcactgaccacattgtgtcttggggtgatgatgaaactacatttgttgtgaagaggcccccggagtttgctagagatcttcttcccaactatttcaagcacaacaacttttcaagctttgttaggcagctaaatacctatgtgagaatccatctcttctatatatataacttttttttgttctgatctatccttaattattgcttttgtgatacacttcttgacaaagttagcctaatcatattaccaattcagagaagattattttttttgtgctacacttcttgacaaagttagcctaatcaaattactaattcagaagagttagaaagtggaatcttttgtagtataaaaacttcaaaagtattttccttcactatttgaactataagactaacttatgattacctagctagctacacaagcttcatgattaactcatgtttgtgaaacagcatacacacacgtatatatacctttccttttttttttctttttcagggtttcaagaaggtagctgctgataggtgggagtttgcaaatgaatacttcagaaaaggagctaagcatcttctatgtgaaatccacaggagaaaaacccctcaccactatcaacaacactaccacatgcatgaccaaccaccacatcttcttcagccagatgaaaatatgtgctggattgatactcccccattaccatctcctaaaccaggcactgacatcttaacagcactttctgaggacaaccaaagactgaggagaaagaacttcatgctcttatcagaactcactcacatgaagaacctatacaatgacatcatatatttcatccaaaaccatgtaagtcctgcttcctatgatgaacaaagaagaagaagtgctattctgaagctggtagaattggattcatcaccaaatgttattagaccagctaagagccggattacggagaagtctttggtaatttctagtgatgagcctaatagttctgtgaagctctttggtgttcctctttgtggcaaaaagagattgcacccaggtaaccttgatctacaagaatagtacttcatagtcagaagaactttacatgatgatttttagcttattgtattggataagcaggtctctatcgactccaattaatttgagttaaagatgttgttaatgttgatgtacatgttatgttgtatgttgtattggactgatccatgattttgttgacatttgaagagaagcattgtatagaagaggcttgtgttcagattaacaagattgttgtttctttagaattttctagtagatgatatgtttctggaagaaaaaaaaaagcaattattttcttattttggagtcaaaaataaaaataactttttaattaattaccttttttttttatcattttttttagtttctttctgttttcttctttctttccaataagttttttgttaaacttaattaattggataaggtgaatgagttattgtaaatccttttgagactgttttcaatcccgacaaataaaaaaaaatatcatcatataaattttttttactataataacaaccaccaacatgttaaggttgctgccccttttattatttaccggggacccaattccaacacttccacgaagaaaggatccaaagtagtgactacaaaatgacaattattcctgcaatacttcaaatggacgacaatattttttcaactttgattttgaagtgtatttttttagacatgtatatatgaagggaaaaaagtgaaagataaaaataattatataaagtaacacattatttttataatatcttctcacagcatcttttatatataagaaaagaaataaaaaaaaaggaatgtaagataaaaaatacgttatgtagtaaatattttttaaaaatggtttgtataaaaactgttgtatataagaataatatattgagtaaataacgtatgtatggatagtgtaaaatatttttatattatttaatcataaattataatatataataagtttattaactcttataataattaataaattaaaatttatattaatgataatttctaattaattggtggtgtaaaattatacggtgatgaattatacaataaaaccgtctatataaaattaaactctttcataatgtaaaaaaaataataatctctaactctaacatatataacgtactatatataatgttattttacattttttatgttcaaataaaaaaattggtgtgcatttgtatcttggaatgttaatgggggcaattcttctttcaaccgttgtaaacagtatatggcttttcaagtcgcaaagtttagtctctttgcaacacaaaatcacatatatagttgagacttcaccaatacaaactagacacttacactttttagctttttaacaggctaaataatttaaagacatattaatcgaactatgtcttaaatatattcctaaactttatccaaatttttaaataaatcattattattataagagaaagatgggtaacaatttatctgtgatgattagaatacaatactttaacaaataaaagtgtttccacacatttgattttatatccgcagtagctcacatggttaaattctaatgttgaatttccgggttcgaatcccggctgcggaataattttgaaaatatttttttcttccttttttttctattcttttaacaagctacgtcaatacttcccttgcatagttgcattattaccattctcaaactatgcttttccttgagtaaaactttgaattaaggctatttatttattttttaggaaaggctcgttattttaaaaaaaatacattcaaaagaattatttgataaggtgtaagttgtaaatgtcaaaacactaatttacgacttctgaatttttaattattcttatttttctttttaaagtcataaaaatttctgacttgtcatgaaatctaatttctttagaagtcatagataaacttgtaacttcttattttttatttatacgttggaaatagaagttgtagaggatgtttgagacttaaaaaaaaaaacagatttattttgtaggttttagttctagtttaagttacgtaagttttagtttaatatttttaaaatttatgaattaattatgtttgtaaaataagtattataaaaaaattaatataattattttaatattaaagacaaaaaacgtaaattggtgaggaaagtttaaaagaaaaggaaaattaagaagttgaaatcttgactacgactttaaaaaaaaacaaattcaattttttgaaatgtagccctatttggtaattttagaaaaaaaaaaattaccccccttagtattacaaccatacaagtgaaagaagaattcaaaaactttatctttattttgagttaaagtatagtgttaagtttatttattgattgttcataatatacaaatcttttttatgtttattccacaattacacaataaaaataaatagtcttattttaaaaaaataaaatagcgctatttaatattttttagatctgtgattatctcatattggttaattggcttaaccctcttgctggagaaaaaaaaaaacttttgaattcattaaaaaaaacaagaacattgtgtgacttacaagttggaacccaaaaatgaaattaaataaactaacttgaaaataaaatgagttaactcattcaattctttaaaattcatcagaaagttttagaataatctccagcttcaaaaggaaaattattataatgcaaatttagtctgcttatgactgatttttttctttagaaaaaatatttttgatgactaatttatggtggcttgtctaaatttaaaaaaaaaaaatgaacaaaaaggcaagaatatttaaaaatgggtaaaaatctaaaaatagataaatattaagtctcgcctaaatatgacagattccattgataacaatcaaatcaaagtcataaattatttatcatagttatttttgtaatctttagttataaaaatattagaatttttttactgtaaaaatattagaagttacgaaatcataaaggggtcttattaaatatgaaatagaacctaaataaattttgtatttttaagtcaattttaattaataataaagaatgtgttaaaaaagcgtattactaacattttgtaagacacattggtttctcattgtaaatttgtaataatgttttttcatcgtacaaaaaaatccacttttgatattaaaaaaaaatcactttcttttaatcctatcaatttctggcttcttaagcccagtgatatttgtttacaatttctcataattgtcaactaattgttgtggtaattccttttcctcctataatcaccaagatttagcaaattttctaaagcaaacgcatatgattcgaattaaacattatataataaattacacaatttggtgcaatatcatcacatccgcagtagcgtatttggttaaattctcagatttgaatttccgggttccaatcccggctgcggaattatttttccgctacattataatcatattggcctaactaacttacaagccaaaatgaaattaaataaactaacttctaaagagaacaaaattgtgttagtgtgttaactattattaagtcattcaattctttaaaggattcattatatattttcgttgatgagaatttgaatcgacttaaagtacttttgattcatctaaaatctcatgtcctacatttaatgtatctaagaatctccatcaagaattctctatgcaagacttaggtcacatttggtttgaacgttttcagtttttatttttaaataaaagtgaaaatatgtttggttaaaatttagtaaacatttttcttaaaaaagtattttcaaaaaaaaaaaatccaaaattgaaaacaacaaatcaaccttttttgcatttttgaagaagtgaaaacatagtaacacttttaaagtatttcctttttgataaatatttttgaaatcttaaaaaatagaaaaatatttttcttaaaaaaaataaacacttaaataagtgtcaccttacatttttgaagtctttttgtcctggcacagaaattatgaaacttcattattcaacttcacttcacttctgttatctaaaaaaaaaaacccttcacttctcttgcttattgttaagggtctcttcttcatacacctccaacaatatcactttacaccctcttttactatgaaagggttaattcaaaatgaaggttttatattccgaattatctaatctagaatttacaaggtatgtaggctgtgattgttggggtgcgggaagaagtggtcaatgctaagccattgttcaagaatcaaactctttttttttttttttttacagatcaagaacctaactcttattaatagtattgtagatattactcttgctatttcttcctacactcaatttttgccttccagaatgtaaaattacatttcagaaatgcactttctttttggcttccaaaatgacctatctggaaggtcaaaaaagtattccgaaaagagtgcagaaagtaacttgggaaatgcaggaagcaacaaccccaaactccacgttcaagcccaatcccactctatctcaaaatcctgcattactggattttatttggcagaaagattgggcctaagaggcctggatatacagtgctcaattggatactcattttaaaaatcacacgaacaatttatatttatgtataaaaaattcacagggaccaactaaaagtgcgaaaaataatcatctagaaatgtaagttgactgttttagcatctggcacatatacagttcacattcatagatagggaaagagataattttatatggacaaatgtgtgggataggtgaattcaaaggtggtgggggcttgatggatgagatgttcaaacattaggggacaaacaccaaaagattgtatgcctaagtggaaatatcaaagcaattaaccaaagaggatatgcttaaattatatatatacatactttctatttcactaatgatcaacatgaagaaatgaaaattttgtttatatcatttgctccatgacccaaaatgaaaagtaatacaataaaaagaagggaaaaaaaaaaaacactaatcacacaaaagcgacttctctaaaagaggacgtgtcagcttacggttagtgacattgtgaattatcaatttggccttttgtttaaccatgcatatgcatttagatatgatttccgggtttctcttgaaaatgttatgcacccaaagggcaacattatcaacccaattgcttggttgatgaaaattctaacttacaagttctaatccagcattattacttttaccatcacaagccactcaatgccaactaaattgtgaaacattatatgcctatcccaagggaaccagttttgtactacaattcataccctattgtgctaagtgatcgcacccattgagccacgttgtccacttcatagaccaaggaaaatgtttcttttcaaatatgtcaaacttgtaggactactaatttttgtgctaacaaggtgagcttgctttagcattatccaccattgaaattcaattcgacagaaaaagacttcactctctcgatccaaccccaattgttgacctgaccacactcaaaggacagaaactactcaactacattcattgcttttaagttttatcacaaacaaaaatgaaggaataacaataaaagtcaccagcgtttaagtgtttgacatttgtggaatcccttaaattaataatgcttggtcacggcactacttcttgacctctaatgttgcgtgagtacaattatgtaccaatccgtcccatttgattttccattgttacaaaatctagtccaaactgaaaatgctgagcactactatcatcgatcagcacaaagtaattactattgttggtccaaccaagtcaaagaaaaaggcaatgcataaaaaaattgtgaatttttttagttaaagaattaagagtaattgttagcaagaatcatagattacttataacctttttaccatcaaatagtttaaggattaggatattaatgaataaattatctaatatctattataccaatcatttaaggaaaaatgacaatgcccttttaatgttacagtctggtctttaattggctttacaatttgccaatcatcaaaagtcctttgtgtatttatgtacaaataaaaaatattactctattttcaaggttgttattctcgatatcatgatatgattagatagatatggcaaataaaagtgcatgtgttatctaaagtttttttaattagtgattaagctttaattaaaataccaaaataaataagtgtgatgattagctagtcatattcttaagtaaaaaataaataaattatactcttttatataagaaataaataactaatttatcaagatcaattaaattagttaagttaattaattattattaataatatcataaattaaattttattctagaaatactcatagaattaaattgttggagtaataattatatttaatgatataacattacatatatgcaatagataatttctctcaccccgcaaataattgacttatatgatcaataggacaaggaatgcatccaattgcgtgaaaaatgagtaggtgttaacaaattgacaataaagtaagaatatattttaattaaaaaattaataattaatacacttgaaaatgaatcaatgtttaatataattagcacacaaaaaaaatcattggtttcttatataaaaccacaacgaccaaggaggcagtcgtaaaaatgaatgttaaaaaaagtttcttaaacaatcacaatagtattaaacaaaaagtttcacaacaatttatatatgaaaaacagcttggttaatacaatatgtaaaatttattttaattataaaaagtaagtcatattaaaaaccaacttaaatgatgggcaatataatcattttaaggttccatttcagtgggttaattgagctgtttgggtgtcaagattaaacaagtaaaaagaaagaaaaaaggaaaagaaagttataatcaaaagaattcaatatctaaagatctgttgaatgtgtatcaactgtcaattgctagaaggtactacatttgcgagttagtggaggatctagaaatcatcgaatattcaaagctaaaagaattacaatttagaaattcaaaagaaaaaaagttaaataaaataagcaaaatcctgaattatctccaccatgaaccctaaacaaagtagtgagtgatgcttaaaatcatagctatgcctattcctagtctagataaggcctaagtgcttaataatcgtaccttgtttaataaatcaaagggaagttgtgcattttttttgacaatgataacgattgttgcctagctatataacagccatattattcgagggggaaaattatacatacaagccaataagttatacgtctcatatctcccgtatcagaaatcaatgacatgatcagaatattatagtgtaaaaaataaaatgaataatatcatacatccgtaataactatttgggtgtatttaattatttacaagatatcagtgcaatactgttctactatagttcttaaatgttcctcgtcttttgagaatcacagtggcctatacgtactcctgattgatgatactatataattgaacttaggaagatcgatgctggaaataaaaggaacatttattattttatttttttgaaaaataaatgtttaatgaaactagtgtgtatataggtttgctttcatttaaactattaaaattggcttggtggcaagacaacccttaaggactatgagtagttgtaaactagtgattaagtaaaattgatattggaaaaagtaaaaatgcgtaaaaaaaattatttttatcagaatatgtaaaaatatatttctcaacttataatatcattatagtggtgtaaaatcttgatgtattcacatataggaattaatttatttaatgaaaaatttatattttatttttttcatatataaatattttttggattaacaacaattatacagtacaagggggataattcactgatttagttaataggagacatgttatctctaactaggataaaaaaatgagcttatatgtaaactttaaatgtactcctatacaattaaaaaaaatctttgtttaattctttaatcagtatcttaagaatactcactaaaaaaaatctttttttagtagactgatgatgaagtttaacatatgttaaaagcactcaaaagtgtggtttattttataatttttaataaatattttaaaaaacgttatctagatgaatccataaactaacaacttgctaaaacgaattaaagtgatactgaaagcattatctgtatatctatatcgaatagtgacttgatgtctcttatgattttacatatttcgaatgggcttaaattaaacttagaacgatcgagtagtagtttatttgattaacataattgaatgatagtatttgacggtgtcacattctttaacagggcaagttgtataggtgtaatttataaagatgggtgtcgttttcagcataaagccgaagtagtagataggttgcattgcatcatgttcacgtgtgtacgattgggaagtgtgagaagccgcataatgcatagaaaaatatttgatatgttattagacatctagaaaaaagagataaaaaaatgaataaaatttataacatgataagaggtgagaaatgaaaaaaaaaatatttaaaataaaagatgatttgatctaatgcatattgcattgttctctctctctctctctgcaaagtaaaatagaaaatgacccaaaacatcaatcacattatcaaaatcaccaaaactttgaaagtgagagccccaataattgaatatcccccccccccccctcctcttcccccatacttatttcttttaaaattaagaacatatcaatatccaatcaatgttaaaattaaaataaacaaagtattaatttactttcgtgtctctttatatttaaaaataaatgaaaaaggttagagaggataaaggttatatagaaaaagagagtgtgcttgtttctgttagtgaaatgatttattaatatacagttaaaatatccagttagtaaaaaataaaatagtctaaaattgtaaagacgaaagtaaatatcgttatcataatagttataattatagatatggtaaaaactcattttttttttttaagttttgcatgttatagtttaaaatatataatcaaactaatctctaaaaaaagtacaatattaattatgttgatttttaaataacaaaaaaacatgttcaaattttttaagtagacgaagaataagtgaaacatatacttaaaaaatttgaacataattttgatattgattgtgtttatatatctcttactgaaaaattctaataaataaagagaattccaatccgtttagatcagacaaaactgtaagttatatacatttttacaagtatttaatacaattacaagtattccaactcgttcttatttattgggtaacttgttattaagaaagtgaaagtggttatgggattattaaagtaataaaggaagcaatgcaacacgcaaattgacgatagaaggtggctgtggcggtggtttagttgctgtttgcaccgtccaattccaattatgcggtgagtgaggtgagggcaataagggcatgcactctttttcagatctattccttcgtgttctccacgcacctatcaaattgcattccttctccccccaacttgtgcacacaattcctctttaattaattacctagctttcatacaataaataatttccatattaaacaaacaagcttgccttttctagatgcacatctatttctttccattataattgtggttttaaattctaatctatataaaataaataaataataatgttttttaaaattaattttattatcattaatttttagcttatattattaatattataaaatatataaataaaaaataattaatactaaattataaattaaaataaaaattattttataacatattttttcttcttacaccgtgggacagagaaaatattataaaaaatctagggtttgataattacttaaggacctattaattacttaggacttattcgagcgagctactgtggatgtcacgtaattaaaaaatttacttataggtagacactcaaaatactagatgtctagatgatatacttaaagagagagagagaaaaaaaaatgtaaatataatgaataacataatttattaagaaaaaaaatgagtacttcctctttgcaatacttagattccaagaagagagagacaaatagaaagtgatgaaagtgttaatttttttgttatttatttctctctctctctctctctctctctctctctcctactaaaattctataatacaagagagaatacacacacgtgaaatggtgatccattatttgtcacctccgcatgcacgtgactccttttattttctgtaaggtagagataaaaagttggattcttcagtcttttgattagatagagtgtttttattttgaataacaaaaaaacgattatattactttactttattttgtttgcatttcaaaattttatttaaaaatagcatagaaataaaaaaaaatacttttatacattatttatataaccgaagcaaataattatttcctatataaatatttgataataaaaaaaaataaaaggaatattttataatcataagtacaaaataatgaatgaaaaaaaaaaaaaaacattctaccagtagtttggagacctggaaaagttgacaatacacagtctccagcttcttcgttcccctagctagaggttaaatgtactcttacctaacattagttaaattatttgatatatatatatatatatatatatatatatatatatgtcacatcataagtatacatgaaaaataagtgaatgaatcctttagttcgtattcaatgtctcgatttttcaaattaaacttttaattaacttgctaatttctatttattcattataaattaaagagaaaaaaaaggaatggataaaaaaatttcgtaccatcgaacaattttaattctagtacgaaaaaaaaagtaatgaaaagtaaaactacctttgtaacttttaaaaaaaaatcaagatgctggtcaaactcttgttatcactttgatatcgagtcttgcattgacgaagtaaatttgatatcatgaccaacatttaatttgtttatattctaaaaacatataattttagaatgatacacatgcatagtgcattataactcatcataaaaatactaacattcctgctatacgtgtaaatctatttctagatgcttccttcagtcaaattaaggcctaacaggaacccaatcgctgacttttttatttttaaaagtcaacgaattgacaacttgattaaacttagtctattcttaatttttttcatatcatatattaaacaggagggattaacttacaaaataattgttttaaaattatttttattcttatcattaatttttttttaaaatttaataattataataagtcattaatattatcctatagaatctaagaaaataaatgataaaataaaatataattctaaaagaattattattgaaataagttgatcacttcttatattaaacatgcaagaaagataaaattatcatagagaacaatatttcaataaaatataattggttatacttattaatattcatgacagatatttaattattgaaaagaaaaggaatagaggggataataattgtttaaaatgttgaaatcttgttgtgacttgtcagcgataacatgtttgttacagtggacgcaggtgcagcggatccaaatccccttacctcgaacttccaacattaaaattagcgaatcttgtcctatatacgttatccaatgtagttgccttttctagtcagacatatttccctccaactagaacttgctacaacaaaaacaaagcgtacaagattttctggacataaaaataataataatttaaaataagttttaaaattcattgatagttatttattcatatatcaattaagtagttcatccgtttaatattagatttgattctcttctcacttcgacgcaaaaaatatgattgaacaaaatgaattttattaaaaataatcagtaagatttttcgaaaaaaattaattattaacgaaatcaataaataatatgaaacaataaaatattagggtaaaaaaaaagttatttatctatatatttttcttatgagaatccttgaatgattgcatgatagagcaatagccattggtgatgacatggatatatgttaagagtctgaatgtgtttgacatccacaaaaatcttacgtaacctcagcctcccattcatttttcataaataactctgccctttcctttcattgtccatcattttttctctatattgccccacacacagaacaagaacaacaacaggaagaaggaaaaaaaaagagaaagaattctgtgattgcattttcagaggagaggacaataattgaggtgtggtgaagaatttgttggagtgaggggaggtcccacctacccttcacattcattatcttcttcatcagaatctctgtttaatcctcttctctatctatctattctgcatcaccccaaagattgacctttgccttggttccattgtttttgtggatcttgagggtcttatgtgggcctcttgctgcttaagttccaactagctagatctattttattctagctacacaccaattatatatatatatatattcccagaagatttattcacttaccaataagattttgagattctgaacatatatttggttcttattatatagactcatcttccatctttttttccatttttcaattccatttctcggtgttataaaacctgttatcagatcttggttgccccacctccatttcttgctgtgttgatgttcccctcctcataaggaccattgtatacagattcttcattcttcattgaatgacagctgtttagattgactacacggttgtgttgttctctcctctttattggaaaccaataggagatagagatagcattattaagctactgtgaggtttatttccatggttcattcgtgtggttctctacctaatttattctgatctaactttggcctaggaggcctaccattgggtttaggtgggctttcactgaaccaataaaaaaaccatttttaaaaggtgttttgttttgaaggttccaatttgctttctgtgtttctttccaacaaggaagggaggttgtgtcattaatttgtgtcaaagtattttggttttgcttttccccttgttagccattggtgttgcacaattggctttaaggttctattatcacatgccatacttgacctgtgaaagatatcctacttcctaagtgctaatgctactctacttaatcacttgcatctccttctttctggttttaaagcctatcctatctctcaaaccactcccatcatgggcaagtgaagtgaggttgatctcccctttgttttacaaagacttgtctctgaagtccatctctaagttgtttaggaaccacctttggcttggttttctttgtcaaattcccacaagaatgtctctaatgaagaagtcttcaaaggtggagaatattgaggactcccaagatatgtcagtgttggacttgccagagctggtgttagaatgcattcttgaaaagctccctacagcttcactttgtcaaatggccggggtttgccgctccctaagagagagctgtgtgagtgatcacctttgggagaggcacatgaaacagaaatggggtagagttattggtcaagctgcttatagggagtggaaatggcatgttgcttccaaagggaatgttggaactcttagacatggaaagaaaaggagcttgttgaggcttgtatcccttagttggcctttttcatggatgagaaccaaggtagatgcaaataatagcatcaagcagcaaaattatttgcctcctgattcactcatgacttggtatcttgctctggagactggcaatttcaggtttcctgctcaggtctataaccgtgaggtatcaatgattatgaatccctttgtggtttttgctattgaaaacttatattctatcatgctaccttcaatagtaaaacaaattagttttttatggtaactagaatagaagattgttgtgttttctcacaagttacatttttcactgcagaatggccatgttggatttatattatcatgctatgatgctgaacttagctatgatcctcacactgacaccttccaggccaggtaatttaattggacatgattcttggtgattatatgtatgcatgctcccatcagtcattgaaagaagaaatattaaaaattaactcaacccattttcattatattatagttctgtcatccatacacatgttctgtatatacatagacacacaccagaattagaatatatatttcatgttatttgtttaaaagttaaaatttaattcgcagaggtaaattaattttttttatgaatattcttataacaacaattgcaacaattttttttttttttttttttttaactttgatcgtaaaccatacacaattctttcttgattgtaagctatgcttttaatcatactatttttttatttatttttcattttaaataattattaaccataagaaataacacgtgactagagcagtaatgaagattcaaaagaaaaatagaaatggcaaaaggaattgattacaaagctagtgttatcatcatttttttattataaataattcagacagagaatatattttaagagtttccataaagaagaaaaagaggatagatctagtggccttattattgatcaattgtttattacaggtatccaccacatggaagaagggcagttgcagttgagcatggcattccatgggaaaggctaagagaaccacctgttgatactcctccacatgatcttcatatctctgattgtctatatgatttgcatccgggcgatcatgtagagattcagtggagaagaaacaaagaatttccttatggtttgttcctttactcaacatattcttctacttttacagttttttatggtctttagaatatggttaaagagctatttaaacaagcataaaaaaagagtggctatggacagaaaaagaaaaactaggatgaatacaaactgtggggagtaaacacaaagaggaaagtggaatccaatctagaatctgataaaaataattgcttatccaatcttaattgtgcattttcctttacatccatctacccttttctgatagtagattgatgaaatgcacctttatggcaggttggtggtatggtgttgtaggccacttggagttatgcgatgggaatgaaaattactgccgttgtcatagtagtggtgagttaatgcattttccatttaaatgaatgtgttttatcattctttatattttcttggctgtagattttaccttttatgttttatcattcatttaatcaatatgatttttgttcctcccttcaagtttttccatttaaatgaatgtgttttatcatccattatattttcttggctgtagattttaccttttatgttttatcattcatttaatcaatgatttttgttcctcccttcaagttgaattatgttctgagtaaaattgcttagtggacagatgcaaggaggatatgatttagggatgattggaggattcggataaattatgttttcttagattcaactgaatagtttataaatatgcaaaaatggagagagataaaagataatgctccagaattttgaagacacaggattggagtgaaggttgaaatactgtttaacggattaaatattttaaagttttgatatttaccattattatgtttttcattgtggaggtttaatggtgaaaaaagttacataaatgtaaagtttatggcagaccagaccacaatttgggctatgttcctttcctgataatatatcaaaacttggaccaccagctatgatatatgattggtcccctagacatatcatggtccgcatgtcatgattccaccaacacattgataatttgtgtctcagtggatacatttatggccaactacgttaaaatcgaaagaaaaaaatcaatttctcttttatgttctgttttctttttgttatgtaatatggggataccacagtccctataagccttaaaagtttacttcctttttctgatattagtagttatgaccagaataatccacaatctctgcttagctatccggtctgatgtttcatttaacatttccttaaccatagataacaatagcaacagaataataataatgcaaattactaatttgtgcctcagtatcttcctggccattattacacattgcttttggctgttatctttctaaaaggaatttttttgtgcaaaactctattgtcatatttttttcatcactttgtgtcagcatgatgacagtttttacacatgttcctgtctattttttttatggagttgtggaccatgcactcataccatcaaaagctttttgccacgaatattgattattgaatagttataaattctgccaaatggaaaactgaacatgtcaatttttctagtcttggcattaggcttttgtatatttccatttcctttcttaggattcaaacatggtttatttgacactgcattatgtgtttgttggttgcagacacagtggtgctagagttcaatcagtacactcctgactcgcgttggagtaagacaactataagtagaaaagatcatagagaggaaggaaatgaagcagatggtttttatggaggaatcagaaagattaagagtgagaatgagatttccatttggaaaagcatttggccttctgaaatcttggactaatcagatttaattttctacttagcattatgtcaagactagtattcttattaagcattagcagaggcaggttcttctgcattagagacaaaggggtataggattctcatcattcaaaccaaatgagcgtttgaggctacctatttacgttccccttttttattatcacattttttcatggttaagtttagcctgtaatttcaatcaatgtaaattgctcatttatgcactgatggcgtagaatattcattccacaatatatagaatgattaaaatctctgattttctcagattattaagcgttgaaatcacacagcaatacaactttcgtaccaagtgatgtaagaagtatttcaggcattgtttatatgcaaacggatcatcagcaatatgcctaaaaaatgctctctctttgcgctaactgatttttcttttggcaataatttatgattgaggtctctagcctcttcagaatgcagcgctcatgctgattcacctaatctaccattcagtgttttattttcccagaaaaatgaatgtctattcaacaatcgctatgtgcaagaagaaaaaaaggactataaagggaatgaagattgttatagggaaatttatatgccaattcatgtgggaaaatttctagacaaggtataaataaccaatttctaaaaagcattggtatcatatggttcccactagatagtataaaatggcaaagtagaggcaacatcacagcaacactaatagaacgaatttaaaattgtaatttaaagcattcattttagctaacttctacattctacctatttcccttcctcataacccaagcagagaaaaaatcttggcaatggcctgtgacataccaatctcattttggtcaactcacctgttcttgggtctttatcccattgtgttgattctgttgctttcacagatttcatgtcaagtttcctcaccaagggttgtttctcctgtgctgccattttatcttctaacttatgatgagcattggctttccacatgttactagtcccaaagagaaacttctttatattttctctcttcttattccttctccaaaaaccacctcttttcccctcatctttctttgtttccatagcaactttggaaattgaggtcctctccaaggttgtagtatcattgctcactcccactagtctcacctgttttgcaaacatcaaccctttgggctctgatagcacatttattcttcctgacacttgctttaatggctctttcttaagttcacatattagctgagctgtgtcacaacaatgtgactcaagttgacttgactttgatattcccacatttttttcagacttcttgttgaagctcctgaatggagaaagtgatctagtcctcctgagaccatgtcttgcacttggattccctctcttttcttctctgaccttctctaaagccaccatgaagggatcaaagtcatcattccacaaactttgccgcgaaaaccgaagcctaagcaccgatcctggggaccttggagacgacagtgttgggctgtgagtgctcataatgctaccatctccattctgatgcatccttggaggaagtttgagaggtggcatcagtggtaagactttaccatcacagaatagctcatcagcaaatgccatagtctgcaatgaatcaccaaaagggttctcatccttttggtttgtctcggtgtccaagtcaccgacactaacattgaacctgcgactagtttcaaattcaaactcatccacattggagtttacatcatcctcatgtgttgctgctcttggtgttgtggggccagtttgagaaccaaagggtgctcttagtttgagcctgctaggactagttggtgcactgtagaagcacatctcttggctgaaactacatgcactcatgtagcagaattcgttggagaaagagatatccatcatatccaccatgtttgacacagaaaactaaacttaagagacttataatgcaatgacataacacaaggtgtagtgtttttgttaaaaagacaagacaatgatagggagcttgggaaacagctgtagtgtagggattgttgttcctaaaatgaagggatttggattatatatatttgagcaactttgttgtcatccctcaaagtaatcttcaaagttcataggtctaccagaattgaatggatagcttttgtgagggtttttctggtgttctgtccctttctgtgttggccttattaatgctgcatttcataaatgtcaaaggaagttaatgtttattctaagcaacttaattcactatgttttgctgtttatcgtgaccctattgttgtcttatgatttcttaataacaattttgcatcattacgtaccaagcgtataatttatctttgtgaagttctcccccttttaggcatcattgaaacgtataccaaacgatcacattcagcatctcataatatttatatttctttgtacatgcggatgaaatatttatcaattttattgataattaatttttatcataaaataatcattgaatcacttttcttaacttttttttattctttttatctaaaatctgagactttataaaaaaatccaaactcaatttcatacggagtaacataataatattggtcttctatcttatttgttctcctcttacaaactgggtaagaagaagtagcataatgtttactttaagtcatggagaatcaatttagttaaacaaatttaatgcatatttggtcaaggtcctcttacccgtgacattgtacatatctatattgccacaggccacaagaggaaataaatattaatggtgcctttacccattgaccctccttaggagtctatatcccaataaattctgttaccagcgtcatcgcaggcactttgattaggcgtacgtggtaattcaaatttgtaagaaatacataatgcaattttggctcttaggcgtaagataaaattgtaggacgtaaatttacgtgcaacaaattctatattatttaccagaaaggagaagtatattaatagaacaacaagaaagttaaactatttcaatactgtgacaaaatttaaattgtagagtagaggagagtttaagtagttaaaactagggtgcatatatagacttaggttcacggattgggcggataacgattttcttttaagtttgtataattttattgaacttttgagtatgacgtgttagcgggctttatttgtgaactcattaactagactaaatttaatgtgtaaataatattaatttgttagttaagattttgatctctttaattttggttattattgttattttgttatgtttaaaatgtttgtatattttagtatgatagattttaacttaaaaataaaattaattttttattttattttatacatttttcacttttaaaaatatttttataaaaaaatatttttcaattaatatttagattctcaaaccaatccatttattcacggatttttgcaagtagaatacatatcttaaaaaaaagttcatactttgtagatcaaatttatctaactcatcaaaaacacatattttccgagtcttaaacgggttggacttgtccgtacatctatccctaattaaaaccttttaagttggattggtactttctttaaaaagtataaatattatttgagtaatgatattcatacaattatatttacaacaaattatacaacaattaccacatcagaaaaaaaaaaatcaaattttagtaaaaagaaaaacaaatttcctatcttaattgaattgctccatatgtcgggactatgcatagatgagataaaagattggaagtgacaaaaactcaatctagcaccattaaggtgtgggtagtttagttgttttttgtgttttgggtgagtttcaattataaactctcagtgaaaaggtaacgatacttgaattgcagcacatcaaaaggaattttaatggtggatgcctaaacaaatgcatgaaggagatataaatcattgaaggagggggcaagagtgcgggaaggattaggcggtcaatgaaaattaccatgagagattccactagattgtttttatttatttttatcaaatttgatattttttggttgttggatttgtttcttttttaaattaagatttttttttttttgctaacctgttagataagatagggaatttatttttttatttattaaaatttgatttttttttttgtgctaatgtggttgttgttgtataacttattataaatataattgtatgaatatcattactcataatattttaaacatctcgcattatttctaacttttttgagtttcttagctattgtaagtggaattaaagacatgccaccatggttcgtcgtaaaacccacaaattctaaaatatacttatattgatataaagaataaaaattaaaataagtaacctagtcatcattcattaatgtttacaatgcaataaattacaatgataatattttcataattataataaataactaatcttatctatggatgatgaagatgaagaattacttaattttagattatttttttaatagagcttttggagctaaaaaataaaatttaaatttttaaatatatattgcacagtgtacaatatttaaggaattccgtgtagcttttacttgagacctcaaataacctcacaaaacgccagagtttgcacacagcaaacccaaaatccagaaaagtagcaatgtttatgatagtggattgtggagaccaaaaagtcaagcaacaagtcatatgcatctatcgttagagaaagaaattagagaaccacaacaactaattaaagtatgaacacgacagataactgatttagctttcaacattggatgaaaacacaaattgggcgaattgagaggtgaattagatttatgtctttagaagccaacatttagctcgttttatatataaaaagaaaatgttagcaaaatgttgaatcgcaaaactatgcagttatatgataagagtatttttgttcctttttaagtattaatatttatatatttattgtgggataaaattgtaaaagataaaatggacaactttatcactatttgaggaatgagaaaattaagtaagtttttttggttcctacataaaaaatcttaaaaggaaagtaaccgacgtggtctatttgtattttttaagtatcggtatcaacataagaaaattctataagatttgatgtgttctctatccccatggtcagatttatttgtagaaaattatgtgtgatatagtttactgtaaaattatgcgtaatgtactttactaatttctataaaggtgtattttgtccattattcatgtagttttcaaagatctttccgtgaaaaaaagtaagatgattaagggtttatttggatggaaatttttttaaaagtacttttagaagaaaaaagtaagaagaaaaaaatgaaattagttttttcataaattaaaatgaattttttattaactaatttatagatgttatatcatcttttctcgtatattagtaaacttctaaaaattaatcaatgaagaacttatttttacttataaaaaagttcatcttattttttttcttattttctttttctaaaagtgcttttagagaaacttatctaaaaaaaaccctaattcaataaatattgtggagatatttgtaatgctgagatttataagtttgaagttgaaatgaagatggttagattttgaaaatgtttttttttcttatgtaaggattgaaagtattaagatgaactaaatcttgacaaaggaaaatctgactttcttttttttatttttaaaaaaaggcaaatctgaccatttgagacatgaaaaaaaaaattcaaggattatatcttgagccgaactagaactagggaggctggggtcccaaaggcccaattagaggttaaggtccttgtggtgaattacaatgtcacccaaatcacactagcacataagagtaattaatatttgaaaatttaaaaggagttacaatattaaaagtcttaaaaatataaaagttccttataaatagtagctcgttatagtttaattaaattaaaattgtaactgtatatttcaagtgttaatatttatattttttttttacacaaatctctacttttaaataaaaataaattactctttcctctcctgaaagatacaaatattataatactatttcttcttatgtgtttgattgtatacaaattaatttatttaactaaatatcattaaattaattttaattaataaattagagtatctattattatttttgagaaatctacataaaactgtctagctagtttcggaaaattggttggcttcaaattttcgctggaaaagaaaatgaacaaacttcaaaaaaaactattaactcattcttttccgcaaagtagaatattcaaaattatttgctttagttggaactttatgatttttttaatgtttaataaaactagcatgtaagctttcagcttataataaactataagctagagttaaaaagctaaaagttaactcaaaacttacaagttagtggatttaattaaaaatatttgataaagttaactgataatttaatatttttaatatttaaattttatttttaataatttatcatcttaaaaagtaggaaaataatttttaaaattttgttttataaaaaatggtaaaattatttttttccattattttggaaaattaaaattaaattaaattaactttgttagaattacattgtttaaaattatttttttaacatttaaatactttattaataatattattttaaaacaaaaaattaaaaaaattatattttttcttaaacactttttttatctgtacaacaagaacataatattatttaatccctttttgttggaattttattgctatataatggagtacatataattttttttatcaactttgatttagttaccaaatattttaactaataaaaaacaatgtaataattcattaaaataaataatttgacattaaaataaatgagttttttccgacagtgaaaaaaaagataagagagtttttaatttttaatttttaaattaaataaaaggataaaatgaaattttaaacaaaatactaagtataaaaatgagaagaaaaaattaataacttataaactagcttatttttttataaattactttaagtaacttatcaaaaaaattaaattaattaaaaaagcttataaactcctgaaaaaaccttataaactttgcattaacaataaaaaaacaaaaacaaatgtcatacatacatttgtctacattctattatcataacatcagaagtaggacacctaattaaattccaaagatgaatttcgggttcaacttcttgctacggaatagttttataaaaaaaatgaataaattctattattttataaaaactattaaaatgaaataaatacctttgatgcagatataaaacacattttattagtcgtcatacaaagaaaataaattaaataaaaatacaaaatatattcaataattatcattaaaaaataagaagtattatacgaattttttttttttaaagtcagatgtatatattaagaaacagaaaaagccttgagtcaatacatgatcaagaacaatatccacaatttggggaggggtctcctcaatgcaatggaactcattaaacaaaaaggatagcctagccaaagtttcagcaaccctattagcctgcctatttacaagagataaataatgagtggatgtgcttctacgcaaaatagcacaatcccaacacaaaaccatcaaaatagctattaatagggaaagaaagtgttggctaggggcatgcaattactctcatactgaacgttgctaaacagtaaacataagatccgcagataattcaatggcccacctgtagggcaaggcttcagcaaaatgaatatcgtggcaggtggggagaagcatagtagaatctgccagaacaagaatcatagatttaaaaaaaaaaaaaattacctatttcattgttcagatactctatgttatgtgtaaataagaaagatgataatatatataatcttatccttacatatacgaatagactgttagggcaagacacaattttattgtgtcagagttcgtgaaccataaatgcatcgaatttttccttaagaatgccttgcaccgtttcagtccatttgatagtagtcttcggatgattaggtgttttgatccgtaagaatcaaaaacaatatcatacaaatatacaataactcatatttttacttaatcaactgacttagatttctttcacatgcttgtttagatttaattgatgatcaaaattatcatatttttttaactcccggctgcggaatactttttaaattatcatattttatttttattatgttttatcaaaatcttatatataattaaacgtttgcattaaaatatcaaagcgtctgtagtagcacacctgattaaattcaattgatgaattccgggtttaactctccctgcggaatattttttttaaaattatcatattttagttttattatttttaaaaaaatcttatatataaataaatgtttgcatcaaaatattaaaatgtctgtagtggcccattggttaaattcaattatgaatcccgcgttcaactcccgaccggaaaagttctcatctgaatttcaggttcgagttttgtctgttttaaatgaacatgatattcaattttattttattttatttttttaataaatctctgtattttgaacttcaggtgcacccaaaatccaaagcaaaattgactaaaaaagatgagagaattgtgtctaatttcttacctacttggatgaacaagaatcgtatcatattaacaatatatttaaactaattaactaaccataaactatagttatatgaacaaaggtgtaaaagatatagcaggagttgtctgcgtactttattctccttgcatggaaatatatataaaaaaaaggcatacattaacataagctgttaaacattaaacagtcactacaccacaacagctccattaatgccagccaaatgatccatgatgcatcattgcatttcctgtctttatttggcccttgttccaaagagtaaaaaaatagtatatgcacttataattaaaaagtgtacactgtcaatgaattaaactttatttctaatttacttagacagaacaaaaatgaaaaaaaaacctttccactgtctatacataaaagttaaattttattccaaaaacattatggaattggaaacacgttagcgaaaattattttctttgagatgtttcgtggtaacataacttacattcttacatacggttattgacaatacaccagaagaaactggtccatgaaaatatgtcacaaactttcacaagaaaagaaatgggagaaagaacatgtaaagaagtaaaaaactcaaaaaagaaacaaaattatatatacacagattacagagagagcttgaaataaacaaggcaaaaaaaatccttcagaactataaatttccacttatctgttatgcaaaggattaggaccagtgtagattatccttttctcatcaccaagaactgcttcactaccaccttcacctgtgttctgtcgtgattttcctttaaaggggctaagatttgacgaaggctcagttctaaagctttgagattttgcatacccattagcagtagatgatgagattttgaacaagaacagaatcaacagtagaattgagaaacaagcctgactcatcagcctcatgctctcaactaggcacagatcgtgcatggaaaacttatataattggctcaaacccccataaagaaagaaacagattaaactagtagcttcttttggatctgattcaaaaagggtgtcactaaaaatacttggaaacaaaaaataataaagcttagaggaagggaagtaaagtgatactactagttgatttggaggagggtgtgatgtgatggtctgatgtggtggtcctttttggtcagggtgtgattttggcaaacttgtatgcggattggattattttgaattcgatggtgtgagtaaccttgaagtgtgagctctgaaaatgagtagagtcaatgactgtgcatgggggttggtgccttaatgcaaataaatatggtgcagaatgtgtttggatgcctttttaattactacttgggaaacaactatggaccagagagagacagaagagagagcctttgctgcttctgttggagcttgcttaggtgatgttgctgtgtgatcactgcatgagagagagaggtcttgaacttcaatataattgtgtatctgtctatgtcagttcatcaaataaattatatcactaaaaaaaattgatcaaagagaatgtataagttattataaattttttataaataatttcaatttttatagttcaaaaaatataataaatcctatccgtaaattgtttttcttttaacttctataacacaattatccacaaactcaaatataggctattaaagaagaaattgaataaaattttgttaaacttcataacattatcatataacttgtattataaaaagtagacttaattacaccttttaagttttcccactatcaaaattccaatttcacccgtctattttcttcatcaatttgattattccattattataatcatatacttttgcttcatatttaacttgaggtttaatattaacataagaatacaattgaatatcacatcaacatgaatgtgttcacatcatatataatacaataaaacatcatgtcaatatttttattacacatcaaatgttaagttaacacaaactaaaattatataattaaaatagtagaagattaaattttaaaaaaaggagacctaatttgaattttgacgatgtatagtaggcaggctagagtacagtttaacctaaaaatatccattaaaacttgaaaatatgtagaaagagccattaatgaactatataattaattatgttaaactgttatcatatgtggcactcaacgtacgtcattggtttgtattctcaacttgctttaattttaattaattgtgtctccgtgtgccttagctccatatattttcagtaatccatcaagagtaaattttcaagtggggtggaatccactaatcaaccaaaagtgccggagaaataggattttaaccattaaaccaaaatcaattagctagggttcatatgcgactgcaaacaacaaatttacaaaaaggttgtgtactagttgagcatatttgaaggatgatcaaatgctacactagattttaggttttgaaagagtaattcttttgcacggaagaaatctagtaattctcttgcaatttcacaattttttgatcttgctatttagtcttattctagcatattgtatgattcataggtcataagatctctgtgtacttttacaaaacaatctgtcgggattcaagctttttttatttttatttttttcagcctgaacagtggaaaaataataatttggtcaaactggtggggggtttgacaaataagccatggaaatgttaataacgagctcatgaatctttttcttacaaagaatgatgttgtttttactcgctttagaaaaggggaaattaaagttcttggcttttggttgtgaacattttttttaatttgttttactcccatggtggatggccccttggctttatgacaataaaaacttgacaaaatatattggaaaatctactttgtagattacaaacttttgtctttttgttttattttaattgaatgtgatagcatggtttttagtatttcactaggatctaaacatgaatttctgtaatcactatcggaaaatgggaatcgatgaacaagctggagacaggtcattcctttcctgctcctacttcacattccaagaaatagacacaaacatactttaagttatgattcactagaatttatgtagttttctaatcactttatttgagtcttttgactcttgagggtgagatcttgaaataacccgatgaaaaccctgaagtaattaatcaccataatagaatttatggttgaagtagcttattttgttataagctaataatttataagctaccttattttcttaagccagttaaaagtaacggatgaaaataaatattgtttgaaatagttgataagttattagagtggattatcaaaggtgaaagtgatattagcatatatggtaactaattataattgtaacattctcagtattttggttttaattaaataaagaattcaagattcaatgattaagcattacatagcttaccttaaaaagatttcaatatattttgagacgtagagactgtttgagttaaaaaactacaagatagtcaaacaggtgtgatcaacccaaacggaagtgaatcatatctatgtgcattcgaaagtgaaaagtatggaagttgaactagcttgggtacagctacacgttcatatgagtagaattactattcaatcactgctattgtcgtatggaaccaacaataatattatagcaacaataaattaaggccccatgcatccctaactatttaagaaatttacctgaagctagttagctagagataaattcattctaggagccatgaccaattatgaaaccatgtcacttattctaagtagaagcatttgagatcccaattatggtagaggggagccacgagactttgaccggtaaaaaagggaaccaaaagcaaagtaaaaaagaggtcttataattatttgattttgcttgtgcaccaatttatttccttgccttaatgatagtctaatgtactcaacaaatttgtatgatttttttttccttttaatgagaaaaaaaaagtcaaggcttacttaacacgaccagaagatgatcattttagctccctttcttaagttcaactctgagagtggtgggtgtccctcatcatgatgaattagctttgtctttgataatgccataattaagttttgtgagtgttatacagataatctgtgcaacatgcatggtaaatatagaaaactttgtaagcactagtccatgatggcatttggggtgtttaacatgccattgccattgccatttttgttattattagaggatttcgcaggatacgtaggaggatgaatcctcctatgagtgttgccacgagctagcaagcacatgatcacacaatgacacaaagtaaattggtattccaaaaagaccaacacctatgaaagataaaatttcttgaccagcatgcccacaaattaaactggggtaaatgtttctggtgctcttgtaaaatttaacttacctagcttgaagttaccgaaaaaattattttttaaagagctttaaaaaataattatttttcttaaaagtaaaataaacatggcctatatatatacagaagaatagaagaaaacagaaaaggcgcggaccataaaggtaatatactttagtttttttttttattcgagttaatattttataggatcaatttgtgtcatgattttattatagaattgatatattcttcactattttaaggattaatttcatattaaaaagaaaaataaaactattatctcgtatttgttgtattgaaagaatatttagtaactttttattcaaaggccaaattagattaagtaattcttttgggacgaaatggactgtttatttaatttgctatattatcaactgttcaaaatgactatttatatacaacttctgcagtagcacacagataattctagttcttagagttgaattaccgggatcgaatcccgctgcggaaaactgttttgaactttcagttttttttttttaattgctctgacaagtttaaatgtgtgtatttggtattgcatcatcaacatattttttttttttttttttaatatccagatggaagctctcatttatagcttgcacgttttttccttgaattcttccaaacatgatgcatggcttaaaatgctaattgtcatgggtgatctttaacacgcaatataagctgaaatgaaatatagttttaatatcaaagattatgtatatgcattattttggccaatgtttacaaatatcattttgaatgaaattcattatacaaaattgaagtgaaatgacttatatttaaatttttatattctaaaagcaagttactactaaaattctaaattcaacttaaaattgtttcaattcagaaataattttagattcataatcaacttttcaacctaagatcaatcacgtaagcatttatctaaaatcacacaaatgcctaacttaacataatttttagatgatctatgaattacatgtttacaatcacatttggtggccaagaagacactgtaatgatgctagggtgagagggcatcacatgtctcccgtcttgggaaacaattttcagcaaaggcatgcttggtagttgggaccagaatctttgtatgtgggttacatactactgcatattgaaggggattcatgtcagaacatttttgtctcaataaccttaaatttaaacaaacacagacatcaagttattgtttgtttccctcgagaaagacattagaaagaaaatattgtaagtaaggaaaataccaaatttaaggttctttcaataataattccaaaactaggataaggattgaaacttaagattttccctaagaaacttaagatttgttaatttccttttggtttccttcaatcctccattcctttctccttcaacattttccctaagaaacttaagatttgttgggatgatcgagaactcttcaaagccctatagttatgacagtgaattaaaaaatcataagcattacattaatacacgatttgtacatgtgccatagagtcacacccttttgatattaatactcaaaataccataaaatttcctattcaattcttgtgttgagtgttttgtattttgagaatatttcaaaaggtttcagtctcatattagttcatatttttattccagaaattaatatctatactattattatatatccaattttaattacacatcatatgaaaaacccttttatggttaacctaattttttaacacatctctcaacttgaattcaatggctctttgaattctatctttttagttttgttatcttagtttacacggaaaatgacctatcatatcttacgagacttatatatcacatggatcagttctaaaagacaatgttattatcacaatatctagaattttggattgttgtttgagttcaatagtttgtgattttcaactacaattaatcaataataataataataataataataataataataataataataataataataataataataatagtctctaaacaattttttagcaattttgatccctatattttttttttctgttaaacatttttagtctctaatatcacacaaaactgatttttaatgaagtaacatccacattaacaacttagtaatttgttaagtaataaaaaaatttaataggataatacgtaatattttgataaattatatttttaatctttcatttgtttagatatctgctgatgatgtcagactagttaataattaaaaatataatttactaaaaagttacatataattattttgttaaactccgatgatgtgacaaattatgttacatcataaaaaaacattgttatgtgtattaataaaggaaaagtataagaagaaaaacacaaaatattttatttagagattaaaaacaaaattaaaaatatataaggacaaaaacataattaatcaatttgttaatcctggcatcaactttggttagcacattgcatatatataaattttgcaagttctaacatccgcagtagcaaaccttggaaaattctgatattgaatttcttgattctattccaggctgtggaaagttattttatttttattaaatcttttaattactttcaacaagtccttccattttgtgttcaaaatctcgacccagaaaaatgagtttgttgattatatattagaatattgttcaaaacacacccatagtcatgcacttgattgggtaaaatttatgaaaaagatagatttaatactactatttgttactctcttgcatatatcgtgcgttttattttagtctttcaatttatatttttgtttcttataaagtttaaaagtctgtggttgttgatatagtattttaaaatgtatttaacatcatcactaaataatagtaatagatattgtttaaaaataaatttctaaaaaaaatcaacaaaaataatttatgaaaaactaaaaccaaaactaaaaagaaaaaaatacataaaataaataataaatagcaatccataagagttttcttgttacagttttttaatcaaaattacaagaacttttcacgagaaagaattttgttctaagttgaaaatattttcaacatgacgaaatattttcgggttcaattcttcagtaacttgttttgataagaaaatattttgaattcctttataaatagtaattaaaagaacccgtgttgaaattttatttgagattaatttctatatgctgcgagtataaaagatttttatcaattaaaatcatattaataaaacttttaaaataattattataacgaaactttacatatcatgtaaaattttctcatttccattagattcccccgatttttccttgttatttcccaatgctaaattaaacttatgtattataaacattcttttgggaaaaaaggagctagcaaggttaaactagttgaagcgatcccaactgagttataattaacactccaacaaacaccaaatacaacaatcaaatcatgaaatcattaaatatattctaagcaaagaagttgtgaaggagagtaacagtttagggtcatttggtagagataaatttagttttttgaaaatcttaaattaagaatctttgttttccatatatctattttaaaaatagcattccaagaaagaatgttttctgggaattttttttagctaggtttttggttttccacaaaattattctcatgaggaggtgaaatctaactttctgaaagttttttattgcgatacaaatattagattactctcattggattatttaatgtggtaaataatcacactggtaaaaatatcacgttactttattatttccatgaaacttagatatatttccaaaaatattatgactaatcaaataaattttgcttatctttacaattcacgattcttgattcgggcaagaaaaaaaaacttttgttgtacaatgataagctaagcttcaaataagcaacttgcactcgctatatttcttccttcccaaaaccaaaactcatccatgagagtgaacatgttattcctctgctactagcatgcagaactaggaacataatatgtagagtgatcatatgtcaccacttgaagcatattgccacattgatataaatttttatggtaaacttaatagttaatatgatatcttggatgcattacttgtgacacggttcaaggcaatggcagtctttgaagtggatggcctccccaaatggttgctgatgaaatccccagccaacatgagtttttcaagatcaacattggttttgacaccaaggccgttcaacatgtaaacaacatcttcagttgcaacatttcctgaagctcccttagcatatggacacccaccaagaccagcaacagaggaatccactgtgctaatccccatctgtttaaatacaaattaacatcccttaatgattgttgagtgccaaaacaaaacacacaaaaaaatgaaataattttttacacactaaaagacaagcttgtcaaaagtccaagctatttagttgatgacttacttggagggacacaagtatatttgaaagggattgcccatatgtgtcatgaaagtggacagctatcttatctattggaactacagccatcacagccaaaagcataggaactacagttcctgaacaccacaaaatgaatgggaaacaatctaagtacaaggatcatatgccagaaaccaatgacaaatagtaaaatgcaaagcacttagttttacattcatccccaagttctgccaagaattggcattttcaccttataaagttcatacttcaaaaggtctacaagaatagagaatcttgtctaccaacaaaatgaaacaaatccaccaccacaattattgtatcaagcatggatcgaagttcaaaattcatcaaatttgttacctggtgtgccaactccaattgtgtcaccaagggagatttcaaagcaacccatatcatataactctttagcaacatatgccacttttgagggagggattggtccttccactgggcatccagcaacacatgatacatacctatggaatagaaacagaatagtgtgtcagtaaaattaacaacatcaatcattgggactttcatgcgtccaactactagaccttgacctggccactttgtgaaaggtattgctttcccaatacagatattgaagcagacagttatttgatgtaatcttaaaataattaaaaagaaaataaaaggcgtaccctcgaacaggaattgagagttgtttagcagcacgagtaacagctcggaaacgaataaggctctcttcgatgctacagttaatgtttgattttgaaaacgattcagaagctgatgcaaaaatagcaacttctctggcaccagcagccattgcagcttcaaaaccctatgaatgtaacaggtcagagatctgaatgtatgactgcctatttatggttatctagattattctacctttaaattaggggtcagaactggtaatctgatgcctctcaagtcatgtactgcttgcattacatcctttgcatcagccaactataagacaaagaaacattattatttaaaatcagatggaatgcataaggataacaactgttgaagtcattcagaattctataaatggattggattttatccaatgatagtagccattcaaaagcatccatagtaaacaccagttgatccatgagattgagaactaatgtcagatacaagcaacttggagaaattttactctacccatcacttaaaaatcatcaatgtcaagttacaacaaataaggtaaagccattataatacctgtgggacccatttgggagatacaaagcttgtagcctcaataacagataacccggtggaagctagtctatgaatcaattcaatcttcacagatgtaggcacaatgttcttctcattttgtaatccatcccttggaccaacttctactatctttacaaactttggtatactattcagaaactgcatcatagccattgtccaattaaaaattgaaaacatgctagttactagacaaagaaatgtgataaaataaacagacaatagaaagtttaaaatatatcacttaattggaaacacgaggaggcaaggtgtagatagctaagttagtagctgaaaaaacttgaacagagtattgaagattatgcagccactgaattaccttataatccaaaccttgcaaatctttggtatggcattttggactgctttggcaatcagagaatgaatcatcaatcattccaaatttcattgacttcctccctttggtcagagacttttgactgaaggagtcgtctcgggataagtctcttgtttgtcttttccatggaaatgtctctgctgtatactcttcatcatcttcactgcacagagatagaaagatattacggacatagtaggaggtaacagattaaaaactatacaacaacagtgattagaacataaaagagggaaaaaggaggttgaatttgaatgatagatcaataaagtgtatcaagtctctaacttaagttgcaatacttgactcacttgcagctattagatgtgctgcaacttcgtccttcaatccagcagtttcccatgcccaatttatctactctaggacggcaagaaccaaacgagaacctctgaatcctatcaatggtattcatgcttggtaaattgtcaagaccaagtggttcctccaaacttgacatggcgaattggttgggttaaagggagctagcaaaagatgtgagagagtaagtactgtgcatcaaatgagaggcctattttcatctgcacatcatgcttctatttagcttcacataatgatattcaatgggaggttatactcttgtgttaaaattgcaagataaattagttgccttttataaatttcattttccacagatgatgccaagtcatataaaaaacagtgaaagaagaatcataattagttgcaattgatttcagtgagtttgggtgaacatttacataattgattttgaagtgatttgatttatgtttagatgtttttaatataaaagcatactagtagtaaaactcaatataaattctcgattcaacttaaaagctatgtaaaattgtttcaactcaaaattaattctagatccaatctcaacaagaaatcaaacacgggataatttacttaaaatcatgttagctggtatttcaacgtaattctagatggtccaatgttaattcaaacatgcatagacaatgcttgtatgaaaaagtggacacttaaaatcatgttagctactatttcaacgagattctagttcatccaacgtgaatccaaacatacacagacaatgtttgctcacattgtctgagcaaatggaaaatgaggagggaagtgaaatggagttagaaatgttttaattttcaatcctgaactccttgttgctttgtagggggcaaaaaataacttccaacttgctttcgtgctgtaatagggccaggatttgtggttggaatgtaaaggagctgcattccacttacaacctttccgcatttgtgttgattaaagcatgtgtgaagtgattttcattcccccattgtccaccaactcaaataaggatacccagtcaaaaaagtgatcaatcacatataattcatcagccataaggtcataaaaaaattgcttgttctgttctgagtatctcatctcaacatcaaatcaaagcctttttttatctggaagcattgtatcaaatgagaaaatgtagcccttttaagatcataaagataaattgtgcctttgggatttcaaattgctgctgaacacaattgactttaaaaacaaaaagggaactcactgtagaaacttgaaaccaagctccataaatataaataaataaataaacttaaagcaaaaaggcactcaatggaaaacagtcatactcaatgaagagtgcagaaaaagaaaattctattttttttcctatttgaatttgagactttggtgggcaagttcctttaagaggaaagaaaatagagaattggaagcagacagacctggaaaaaggaaaagagttgaggaaaccctagaaattggagaaaatggaaagaggaattaactaggaaggggtaggaagtggagggggtagatgaagaagaagagtaggaacaaagggaaggaaaaggtcattgactttttgtttgataatttgaattcaataaagacagagaaagaggaactggttttcagttggtagataggtgactagttaggtgagtgacacttcaaaataaacataggtgttaatacaacaaagagttacgttgaacttgaaaagaaagagtcatttatagagaaaaaattatgctttgagggtgtgaaaaattgtaggtttaaatataattttattctaactattttacacaattagaaattttgatttgcctattaattttggtttaatatttaattttttctacttttatttcttacaatccgattaattaaattatttttgatggtatcttaaatgaatatattaggtctagaatttaattagaccaaaataaaagaaattaacgtagacaaagttgaagatttgactaaaattatgaattttctaaaataggagaaccaaatgtctcaattttaaaatgaagaaaccaatattgtatattgaacaaaataaagaaaccaaaattgcatttaaaccaaaattttacccagtcattcaatcataactcacaatgtatggtaaatttgttaacttttaaaataattatcttaaagtaattcaaacggaaatgtgtaattaggtaacagtgtaaaactgttttatactattagtacatacatattaaactctaatttatatcaatttaatttaaacatggagttaatgtaaactgttaattccttagttgaaaatcactctagttataactatactaacttataagatgatgtctagggtggatcacttttataaatgattcatcatgcaccacaatttatatctttgaaggaagtcgttgacagatgatataaggggattcgacgatgatggagcgtgatggtagcgataaccataaaaaaggaggtaatgtaggaaggaaagaaggagatgattcgatagagaaaatctatgataacattttacactttaactaaatctaatgattataaattatgctacataatagaccacttacaaaagtggtccaccctagacaccatcaacttataattcagatagatactagaaaattcaataatcttaaataacttagtactattttccaaaaactttttatcatcaccttgtcttagtatgatcggaagttcaactaaatattatttgaagtatcttgaatgaatacgcaatgtctatagttatgacaatagcaactgtgtggtttcaaaaaatacgtgtgaagtggccaataattcagggatcaacacacgtaaaagtgaagcagacgcattggagaacaacccaatcatgcaatccgttggttgctcgatcctaagactttcacaacagtatataattgaagtgaaaaaactatgtaactctttacaaatatgttccaaggcaccgattagcatttgaaattaggttggagtattaatttcacatcccaataaaaaatttctattttatgttcttagacactcgttagcattcatctttttaatacttcctttgctacacttttacatgatgttcaaggttttaggaatgttattaatttgttaatttttttagaaaatattagataatttcttaatatattatttatttttctaattaattactcatttactcttattatacactactctcactaaatattaagagtagtgttgaaaaaaaaacattcaatgatatattagttttgtaaaaccatatttattttgaaacatttttttttaaaacatcaaatattaatataatatagaacgaaagaagtaatatctgacaaatgaaaaattatttgttttagtatgatgagtgtcctttccataaaaatagattctgaattccgtcccactaaaatgatgagacatacataatttggaaatgtttaatgcttttcagattttgtatttgtacgcaaaaaacaagacaggtgcccaaccaccaactaaaccattaataaagatgaagcttcagaccagagcaaagctcaagctcaacactcatttatgccaaatgcaacttacaacaaatatctcactttaaatcaaattcaattttagtcgtcgtggtatttaattactttatgaattgaactatcatagaggttgtgaaagatacattgaaagatgcgtggtaagtgtgaacattgttgcaaggagcaatagtcattgaaagatgcatcatgcatgctactttataaatattaggcttaatgtgaattttagccccttatattttacaattgttttattttaatatattaagttctaaaattttcattgcggttctgtatatttttgaaatgtatgattttgatgttttttcaatattctgttagaaatgatagaattctattaacatttaaattttaaaaagattaaaatgatatatatcaaaaacataaagaattaaaatgaaacgtttaaaatttaatataacgaatcaaaactgctactatcattattttatttttaaaaataaataacttaaaaaattatcatctcctctaatctctttatgatatgaaaaagtataaaaagtaacactatacaaactgaacaacgtcaacatataatctcattgaaacccctgaatattccaaccatgtagggaggttgcaacggagagggcagcgagggcgagagacgaagtggcgaaaggagaatgaactcttatccattgtgattgagaataattggtgaatgaaattattattactattatcaaatgattaaattgaatgaaaaaaataatactaaaaataatatgagattgaatgttgttgttatttgtggtttcagatccattttttctttatttattgattttcaattttcaaataaaaaaagatagtagagatttttagttgttactatattaacttaactattctaaaatttaaaacatgactcactaagtttctaaccaaaaattgaaaaaagatcaaagtgatacatctgaaaacataaaagactaaaataaaacttttaaaacataatataccataatagacccaaaatgatattaaatcatttaaaaataaaaaattagcataacatcaacatttctaacaattgaaaaaaatgatcaaaattatacattttaaaaacataaaggactaaaatgaaacttttaaaatttaatgtattaaagcaaagcaactccaaaacataattgatgaaaaagtaacattaaacctttattacagaactaaaatcccatacattattggataaatcataaatgagacttgagaggctgccaaatttgtgttttacgtagcagcgagcatgcatggcgattcataacttttggtaatatttattttaatcagaataacattattttgtaattattataaaacaatatcatctgaaaataaaacagagaacttattgaaaagataaaataaactaaaacatagaaaccgggcatttttttttttttctggataaccaggtatagaaggaaatgtcgtgtttcttggtgacactaacctatcaactgctagcatgatttaaccaagacaaccgaacttaaaagtgacttaccaataaacgcaaaagaagatatacaactagcatgacatagtggcatattaatgaaatgataggaaatgaaaagtgttaatcttataattatgcataaatggttaaaatcattataattaaatttaatattaacaatccattttaaatgtctagtcaaatttattcttgtattctcatcaatcacctaatacctgtcctactaagctactgaatgcctcaactatcttgagttttcagttgaaatattatcttcctcgggtataagcacaacacaggcattgtagataatagatatattaaaataaacaatcaactctctcgtaaaagtgtgaacatattaaattattaatacaacaaatggtcgctaagagtttaactagtttcccaaatcagtatggttattatttaataatgcttattcatcatcacttgcatgatataactagtctatttaccgcttaaaaaatgatcccaaggtaaaataatctagtacatattaagattttttattttaaaaaaggctaatttatatttattcacaatcataaaataattttataaaaacaaaaaaataatgaaaaactgttcaaaataacttctaattttaatcagatttaacattcttttcaccttttgactatttaaaaaaataaacaattttttttaaagttattattattattattattattattattattattattattattattattattattattattataactgtaacagactttatctgatacgatcacaatcaccgcttataggcaaataaaaacaatgaagttcaaacaatagaaatgaagaaaaaaaggggtggggttaatgggggaagaatactagttcttaataatacaataaaaataaataagtacaaatcaaaatgtcgcagatattaaattataaaatactttgatacagtacaaagaatttatggctgattgtttaatcataagaaatgtcgaaagcatgcgtgattctttagaactctaggatgattttaagaagcttcgagcagcatctaaactcaactcttcattgacctaaaatataatggaaaacataaaataaaacaagaaaaaaaaaattcgacaaatgcaatactaacaaggaaactcagcttctaattatatgtagtatttcattagaaacatgttaattttcttatttttctatattttgttgcaaaacatgtataatgttctcaagtctctgcagttcacaaaattattttcctaatcaatgaaagacaatccttcaggaaagactcgcctaaaaatatagaaaattccattttcatagaaaataatacttttcaggcaaaacttttttagacaatttcacaaaaaatgctttccaagaagataccaagttgtataaaatatatctttcataatatatttgttggaacaatgacttaaatcacaattattttgcacatactagtttcttatggatttgttggaacgccttgcaaaatctctccgcttcttctggacccacctgttggaagattagaaccaatgagctgtgtctcattcaaaggatacttaaatacttgtttaataatcacaggtaaatgtcatgggtcctcaataacatccccatcaaagttatatgcttatacagcagaaatactaaagacataacataaccaccttatctcttttgtcactactgtctgaagagcttgtaatagtttaatttaagatgtaactacagctctcacaaacaggtttacgaaaaagaaaatgcaatagagaggaaaaacctattctagcacagaaatattaataagaatatttctcccttataacaaaaaaaaaacattttccattacattagattagagaatgcttctctcctcatctttacaaaataatcataataaagtacccaaaaaaaactcggcaaaataaaggtccattaaatgaaaatttcaactgggcatggaaatcaagtaaaaggtcactgttgccaagggaaggaagcaatgatgcaaaacaactgatttattgacataccatatgcgactagaaataaaaaaataattttcaataatatgggaaaatagagaatttgggtttaatcaacaaagaaaataataagcaactgatgcataaatggaaaccaaggtatccctccatacgtcaaactcttcttatggaagattaagtcaaaccatctagccattgccattagttttcaattaaaatttcaccatttgagattaaaaggcctactatattcaaacttttgaaggacttaaacaagggtgtaaccaaatttcccataacgtgctacaatgctaattctaaaacaaaattagtatgcatttaataataggtaaatttcagaataccttcctagcagcctccgactttagcttgctccaaaatgaatctgtagatttgaagaattcacacaagcatagcattaatttcaaaagcataattctgtttcttatgagttataacaaaaataattaatcagacagccatataactcatgaactttgatgtgctttctcgaaaactgaagttgataaaaaaaagtcccaaagatagtggtaccccggtaccttgttgattaattccttgcttctcaaaatccttatccctttcatcccatgcatcttgccattcctttacctgcagagacaaatttgttagctaacaataaatatatatgcagacatcaatgcatacaacagattcaagttcagcattaccacctcattctgtgctgacccagatgcaatttgtctggatgatgctgcttctgcctgaaatttaacagttgccaatttggtacttcaatgcattcacaaatatagaattttgtaaattatttaagctaagaaataaaaatcttggattttgcatcatgtatagtttcagagtatgctgtgggcatcagtatctcaagttcagaaactaatatacatgccagtcctccaaatgtgtaaaagcatttaaggtagagaaaaccaattgattcatataaaatgccaatgttgtgcatactacaaatgtaaatggactaaacatgggaaattattccaatcttctttgaatcaaataaaaatcaaaacaagatgagataataattggttctgacaacttcctgggcaaaatcctagcaactgtaaggaattctccataatccaaactgagcacaaaggaagcccagatacagaaaagaaaggtcaagattttgtctctaaattctaaaataggtcaagtagcaagtcccttaacatcattctagcattttccaatcatcaacccacgcatagaacaaaaaaagttaatttatcgtactgatccatcaaaccatagcaagcagagatggctttggatttcagtatgttcaaattgaaaagagaaagaacacacaaaggaaggaggataagctatcttcctaaaaataatattgaaaacactaaataataataagaaaaatacaactaaagatgaaacttgaaagtggaaaacaggagagctttccaatccagacgtttagaagagaaacttcctttaaaaaaaaccatgagaagggacccaggtagaatcataaattgaatacaaccttgtcccatgacaacttcatagagacgaatgtcctcaaacacaaaatcaatccatttcaatcaaatacaccatagatctgcaaacactccatagaatcttatccttactgctcaaacctcctaccaaagcctctaacttcaattcctaggtgaattacccaatttcacaacaggaactgaaaccacatccttacttataaaatccacccaattcatgccaggaccttgttaattaatatctcatactaaaccctactcatatatttatggtaccctaacccagtctgttgcacccacctaaaatttccacatgaattcagacactacagtgcattactctaacactaccaccttaaaccaacataaagcaaaagggtacaattgtatcagagagaagcaatatgtgaattacgaaaatcacaacatgggtgtctgaaaaatcgaaactttaactggcagagaagccagatgcagagtaatagagatccaaaattaaggaaaaggcacagtgttgtaaaccctaaacacagagagaggagaaagagagaagtacagtgtaatcgcgagaacgaacaacggggaagagttggagaaggcgttgaaattcagcttcatccatgttcactgcaaccccttgttgttgttgttgttgttgttgttgttgaaggagaagacttcactgaccaaaaccttctgagaacggagaaacgcaatcactgtaatttgattataatttgatttgacggggtaaaaaagaatatctttaataaattacttaatctaactttattttttgtatttttttacttaatctaattattggtatattacagtctgaatgaattttactaaattaaatgtataattttatactcaaattatgaaaatgaaaacgagaatgtatatgtctatgtcacaagtttttaaaaagtatttttaggtattattattgtctgagaaagctataatttcccttttaccatgttttctaatatttatattcgtactagaagatgggaaactgatatttgtttaatacaaaagtgactttcttttttatttaaattacttttaatttttttataaaaaatactaattttatttaaattattttaaattttaaaaattattctcatgaatattaaaatataataaacatatttttttaaaataaccaaaaataatattctcatcttatactcctaaaaatagcattcctaaaaatataagaaaattccataaaacaaatactcgattttatgtaattaaaattaataatataaattatattatgattagaatttataataaattaatttatctaaattaattttcatattataaatcaaaatatataatttgaaaagtggagttttctttctcttcactttcttatttaaatattcttaatattttttatatataatatttgtttttctcttctcttattccaaagtatacacaccatcttacaataaaatatataaccttattttttggggtcaccaactaattaccttattaatacgttctctaaatacttaattcacaactatatttcaactctttcaataagaatattttaatagaaaaaatattgtcataataatcaataagttggataagtaataattttctttaaaaaaatgcatatctccttgaagacaacataaagttgagcatctgccatctaagtatatcattacaattgccatattacctgtttacacgagtaaggtaaaaaaaaaaaaaaaaaaatagataattttaaaatataatgaaagacatttaagtaatttcaaattatgaatattcataaaatatagatacttgctatccaccctcatcgtgttaaaaattcaatccgtaacggatttcacccaagggtactagtttttttgtcatcgctatatgtggacctactacaccaagcacgagctatacatagtaaatgtttcatccacccaaaatttcataaatgaggattacagctatagctcgtacaatttactatttccagtcttgaagaatgttgacacacttttttaatattgactttgctccttcgttcttctctatctcgtactgatgaagcagctcgtccttgaatccttcattgatggtgccaactgaagggacgtccatggcaaggttcatgacttccagtagacattctgaagctgaaacatgaacctgattttgggcacaagaaatgcagaatatgaaataaaattatcagcaaccaattagattactgaaagaatcaccacttgttaaagatgaacacgcaaagaaaaagtttacaagtctagtccctaaattttggcaattctgtcagttttgtttgttatattttgaaatttaaagtattcccaaaaaaattattttacttcagttttattcccaagtccacttttgctagatatggcaaccaaatgtaatgtgtgtagtaattttcacttagtatttgttgcatttagtattaaagattgggtgaaactaaaataaattactgggcttttattcacctgtctggaccactccaaccttataagttctacatgagaaaaagaaagacacttgtttgcatacaaactgatggcaaatatattagtacatatacaaacacaacaaatttttggaacatgtttcagtaaacatttcataaataacgtttaacaaatatttaaaggaatgcaatgaaaatatacatgattcccagtttaaattgcacttctgactcatggcattataatcaattgtgttgtctattgaagtcaactaatgtgcctagcgttcagatataagattttacaaacttaaaaattaataccaaacaaatgctgattaccttttcagggtttttgactcctataaggcaggggaatctaactgatgaataatgttcaaccaaacaagacagtgacgtggagttatagggttggtttggtggttgaaaggaaaagggaaaaagaagaaattgtggatttgaatcccttccactaacattgtaacaaaaactaacaactaacatttgtcaataaaaaaaaaacaaaacaagacagtgacgtacctgggcaatttttattgtgcttatgcaatgtagtatttttggtgccagagaatgaaatatctgaagaaaaataaagttgattttagatcattcaagaattgaagttattagaagtccaactgaaagtaagcctccattacctcctgaacaaaggaagttgctccagcaagttcgttacttccctgggagtccttcacaacattgtgaagccttgagcaaagttctctgatggatacaaaagctgtagttttgactgcacaaagaaagctttcttaattaagattaatagaaaaaaatggaagggacttcgaaaaatgaaaaatgagccataaagaataccagtccatttatgttcaggtaacaagaatgttgtatacatgtgcgctaagcccttttgcttttcaagaatatcatttatatgtgccacatggatacaagaggttaaacagtcaactattttgttatgtggaacagaaatctcttcaacactgctcaactctgtaaaaaaaaaaaaagtgtatgtcaaaatgcttgtagtcagtagcactgagcagctccgacaggaatcgatgtaacaaggaaagaacaaattattcaagtggctggccatttgaaatagccattgaaaatgcttgtagtcagtagcactgggcagctccgacaggaatcgatgtaacaaggaaagaacaaattagtcaagtggctggccatttgaaatagccattgaacagtaacacaaacaaggagaatcatccatttcatcaagtccctagatactaaggtcatgtttggtttgacaaaacgttttctattttcaaaaatttgtataggaaaaagtgaaagcaaaaaatgaaaataaaaaacaataaaaaatgcttcactttgtgtcctattttcattgatggaacttattctccaacactactacatacagtatatattagaaatggaataggtttaattcaatcccaaaaagttagcttaaggggagaggattgctcaattccggcttctagccatattcctaaccaatgtgggacattttaacaatatcatacaagaaacaacactctttaactatttgtttaatcagcaccaaactaaacaaacttaggctccgttttggggtgatttttagttgtttcaaaattttaaaaaaaaaaaaaaaaatcagttttcagttttagtttttttattctaatttttagtttcaaaataaactcattttgaaagttttcgatcctattataattagtttaagggtgtatttgtgtggtggcgatggtgattacgacactgacaacaacgacggtggcaatgtcggtagtgatggttggcgatggtggtgcccgtggtcatggaggttgttgtggtggcagtgccggtgccagtagtgatggcggctatggtgggggtggtgggaaaggaagggtcacattgtaaaatgtaaggagaatgtacatatttaaaactaaagaccaaattcataaatccgtttttcttggttttgaaatgaatgagtaagtttgaaattgagttaaaaatcatctcagttccatttttgtcaaatgcgttttgttttggaaattgcatttgaaaaccaaaaaccaaaaaaaaccaccccaaacgggcccttagcatgagaaacttcacctcaaaaactgcattaaatgtttcattggtgaccatacagtctcatatgaggaacaaaaactgttgcaagatataaatgaagatccagaatttgtcataacctgatccagcagcatcactggccaaaggtgcttgcccggactttaggggctctgaattgcatagatcaaacaacaagggaaaaaccatattaaagaactctggattccccaaggcttttataacctggaaacatacaaaaaataaactcattatagagtccaatacttatttgggacgtcactgttctgtactcttatagaattagatagttcctaatacttttggtccataacttgttatagattaagttgccacttttctcccttttttattataatttatcttttgcttgaatatttgatgacgttctcaacaaccagtacaagcaggcacaaccttgcaaagctacttatacaaggggcaaagtaaacctgaaggggtcttatatctcaattctaaataacttttgccaatttctagtacaggcaaatttctttcgtacatttactcattcttttctctagacagttctacaaaaaataggccattatcaattcatttcataactgattaacaataacaatgaattatcatgttagttatacagaacatacaataatgtacatatcttcacttgtctcaatggagatggagtaggttttcaaaaagcaagaatgctagttgcttttcaattgaatacttaccctaagggagaaaactttcccaaaattactaaccagcacccactataaattactaacctgttcaagagaggaaagtgctgcttcacgatactttttcccctttctggtgcatgcagatgataccaaattcagaatggcaatggaagatgaggaaccttgagccaaaattgctttatggcaggatgtacatagagcacctactgctagcaatagcatgtctttaccctgccatatgtaataagacaaaacaagcacatgaaacttgagcaatttgtctttgattaatttttcgtaataatttttcctgccacatgtaaaaactttaagtggcactattctcaaccaaagcaaaattcattactttacctcccatagccgaccaggaatttccttcatgagagactgaagcaaaacctcatggtgagaagaaagagattcacccaaaacttcactaagcctgcatatagcctctgcagactgcatgcaaaacagcagaaaataagcaaacatttatacacgaatcatgaaatcaccgagcttctatgaggctatatcaaaataatataaaatgcagaaaagaaggcaagactaacttttcttttacttgcccatgatgatgatgacatgccctcacatataagaaaaacaatttctcctaagtacaagtggagagtgattcgctccccacttgtgtattcttcccatagttcctcaaataggctggagacatttttatcatcttcaaatctgcatgacattttttagttcatgtaaaataagaaatactttcactattcaatatgaagtttagtttgttatatgaacatcattcaataaacacagtttaccttaagtacctttaaaattcagaatcaaatgcctaaaacaatatacatagttttccaacattaaatataaaatccattattggccccacctaagagcttaagcttttagcaagtgtgggtccttgaggctgatgtgaacattcttcgaattaaattataattagagacaagatgtctttggcctgtgctttttccatgaactaagccaaagatctttcacaagagggggatgtgtgagaaatataaaactattctcagccctccacctaactttaaacttttaagagagttggtcaatgaaactgaaagaacttggtgttctccatactaataatttactaaaacaaaggatactataaccagactaaatgggacaaaaacatgtttttttttttttgtcagcaaaaaattatatatatattaatgaaaggtaccagaagtacccaaatagcaaaatgtgatcacataaatttctcagtagccaccattaccaagattagatgttatttcagcaaaatgtgattactaaacatggtaatggtactcagaaactctaaagtgacctagacttggatatttgcaaaatacattcttaagattcttctttttaaattttaatggagcatgaaataatttctgaaactgatgagaatgcaacagtaaagagattagtacatcctttgaattgttacaagagaaattataggaaaaacaaaagaacgaaacaaatcctgcaaattccacaatataacagacaaataaagttgttacataagcatcataatgaactcgaagaagaccacatctacttaaatgtaaaggaatcacccaatgttctccaagaacaataaaagagttctaacagatcatagtagaagatattttgagagagagaaattttagaaagaagtgaaaatgattattggccactgaactttgagttacaaacagtatttataggcttagatagttatgactaactaactcaacataaaactaactcctaactaattcctaactaactgagagtgcagttgaataatgcaactctctgtacaatactctaataaacaacaaacaaatcattctaactgatagtgaatggcagccaatggcaaaagcttctgcttaaatttatgattttggcttgatataatatcgaaatatcggatttttataaaatatccacataataaatcacatcagaaaaaataagaatgttcatgaccttgaaaggaaaacaactggaatgataacggcgtgatatccaccaacaacatctgctgccatagatgaatagctcttcaagagaaatgcacatgcaatttgagaattcttgtcaccagcatgcaaagctgtagtatcttcaataagtttttgtgcttgagaggctggtatatactttaagactttagcacaggcacttgcaaaggcacgtttcgcagcagtacttttttcctccttaacaactggaaacaacaatctcaccaacatatttgcgtatggcttgatgtcaacaccaacactttcaagcaacaaggtaatgaaattagcaacaccaaccctgcacaagcacagaaagaataactaattatagggaagaatattcccaaaaagaaggaataggaaaagcaaaggaatgtaatttttttttattaaaacaagaaagctggagcatcagcgtgataaggatgacaatatattaatacagaaaacactgcaaatatcaaccatctatttatcgtcactaatcctacatgctttttctactaaactcgccctatttgaaccaacataagctccttaaattttcaagggaaaattcaataacaaaatgactcaagacagttcaagcaggaagacaatgcaaaagaaaatgcatgaaatgtgataataagttaataacagacctagtgttaaggcccactccagatcgcactaaatgagcaagccgtgggatcaatgtattcaatgattctgcatcaacaacttttatgcatgaatccagagtctcccacataggagagcctttggctatggagattctcaaactttcaagcttttctgactgtattccaacatttgccgcatgaagctgataaaaagaaaaacataaaaagttagcatatgaataaacaagaattaatggtgaatttgtggaagaattgaatatatcattcaaccaaacctcgacataattgagtgattgatcttctaggcttgataaactttcaagcatgcagcacactaaatcagacatatgtggtcgaattgcagttccagcatgctaaaaggagacacactcagatttaacagcagaataacagcactgttatagtctacttccataataatcaatcattaatcttacacaatcacaatcagataaacaaagtcaaagacaaaccagaaatttcatgacgtataaactaaataactaaaacaaaaagagacaacaaacacatccaaaactgtgaatgctatttaaactttgtaatgtattatatgtgcaggttagcactaatcatgcttaccaggaaatacaatttctacaaacatttggtattctaattagtttttttatttttgggaaagaagtttgaaaaatataagtacaagagaataggataagctgcactccttaaacgattaaacaaagaacatagtaccaaaaaacaatacatcagtaagtgatggacctcccatctaagtgtccaaaaaaataacacctgaaaaatcattggaataatgcacaaagaaaacatatacatcccatgataataaaaaacaacaaacaaaaggaaagataataaaaaacaacaaacaaaaggaaagataataaaacactagagccaagaaaacatatacatccctacaaagttcaataagatttgaactacaaacaactcttgagatgtgaatacacaaatatttacaatccggaggcagaaagataagagagaaacaaaaggaaagtgagtgtatgacacaagttgaaaagctaccgcatagcaagacattcctaacctttgtaagcttcataacaactgcaattgatgccttgcgaacactatcaactttacttagtataccttctgcaagcaaaaaaggcaaaacaatatccattgctttgtgcgcatctgacatatcagttagagagacatcacagagccttgttgtcaaggaagttacagcacggcataatttttcaccagaaattctaacagtttcctttatgtcatccattacacgaaatgttccagaccataatctctttaaatgcttcccaacctgtgggtggtgcaagatgaaataaaaacacacaaaaaagaataaagacatgctgatatgctccacagcttcagatatatcaaaatcaaccagtgctcaggttctagtatatcattaacattgccagttctttttcactttttaactctcctttcagcataatatggtctttctctcgtaaatacactttatgcaaatcagactttattagcacacataagatacacaactggctctgcttaatttttcaagcataagcaacaattagattacaactaaaaagaggaatattgactaactggtttctttaaaggaaatttcatagaaaaggaatacaacgagaacaaaaatcctcctagatcaaacaaaacataccaaacagaattgttcatcaaatataaatagctctctaatccctcttcaaatcaacacttgaaagccccctaaataaacttataaaccatattttataccgacataatgccgtaaacaactcgacaaaaatgggaaggaaaaaacagaaggccagaactggcaccattcttctcctttgacaaacatcacaaacccataacaataaaaatgctaaaattttgctcagatttttacagatagtgcctcaccataacagtgactagggtttttgttgctacatgtaattagttgattacaataattttgaggatttcttttctatcatagaattgatcattgacaattctaagtatgcttatttatactcaagaaaaacaaaagaaatgttaatgacctcatgaaactttcgtccttgaataatgtctgtaagggcaagacatgatgcctcacgtgaccgccaaagcctggatccacattgtactagtaaatcatcaatgatgagatctaaattttcatcgatggttttctttgaatcatccacaagtgacttccatatatgtaccattgcatcctaaacagaaaaaaatgcaataatcaagtgaaataagtgtctgaaaataagaattcatatactcattggatatcatgcataacattgctttttaataaaagaggaattgtttattgaaaaaggcaaaaaaaaataataataatacaaactgcacattatttttttgaaagtttaaaaagaaaaatcttacatggaacacaatagagaaccaaaccacaattttatgcggcaaaactacattttgatgttcgaaaacaacggcatgaattatatagtactattatgttctatcatagatcaaaactgggtagagagtttttctgggttaaactggagatgctattggtaagaattagattcaacaccaggcttaccagattataaataaaaatcggaagcaaaagataataaagtaagtttcattttttaatgttttgactttcaactgaacccataaagaactggagaagcaatgcaaatgctattgtacttgtgtgcatccattccttttctgttttttattggaacaaagcgttaaaccgttatagaaacttggggttgggggcagctgttattctctaccactgattttctggcagtgatggcacttacctgcacatttttgtcaggatcatactggtagcgtacaagccttggaattaaagaacgtaaatatggcttaagaacaacccctgcttgttttgctattttagagaagccaaaagcagcacccctctttgaattcagagaagcttgatagtttgctaaatccatgaacttataaattaagtccggttgtcccatctcatttgccaagctacacaactccttgtaagtgttcagtttccctccactagcactttccccaagagctccatccgtaaatacttcagtatcttcaacaagctgcacaacaaaacttcaggaatgtaattttaaacaacaaaattaaaggaagagagcaaaaaataataaaccatcaagccttatcccacaaaaaacaatttttttttttttttataaaatatgactagactaacaacttactttgatgactcttttccgtttccctgacccagtcaaggtattaaccagtgcattcaccaaattctttttcatagattcatcaccaatgtcatacacaatactcatgccctgagaagccaactcttgcgtgagttcattttgttcagcaagaaggtgagaaaaagcttcctgcatttacatgataattgtaaatcaaatattacaagttacaggattctgctacaaaatagatacagtgtcaagaatatcatataaaacaaatgggtcaatggtgtttctgttccctgaaaaatggacatctttggttttagtccccaacttttaaaaccataagttttcattccctaaagtgttagctttagggactaacttagtgggtatttaaaaaaatagagacaaaaacttatggttttaaaagttgggaattaaacaaaaggtgaccatttttcggagactaaaaacactattaacccaaaataaattataagaatacccaggtaaccaggtttaggaaacattttgtggtttcacaacaagaaaagctccaccacatcaattacaacaacaatttagaatattaacatggaagaacctcagcccagcaaacaaccttgaccaagcactcctgcttgggcaccaaaggttataaactggaatccagataaacacacactcccaccatcataataaaattcagaaaggactcatacgagcacctttaacaaattcagcaagtttaaacaaagccaaaattgttttcttaatgcaaacctgaatttctggaagcattcgctgaatagtaggatgattgccgcagtactttataagtgatactagccaaacagttccagcacatctctcttctttcctgctactatacaaaagaacatcaaagagctttttggtaattgcatctgtcacagaagcgtgataatctccactatattcactttgttcattagtactctgcttagatacagaagcggtcaaatctcccatcaaaaaatttgaagccattgacagtgaagtatagttagttttcagaattatgtcagcattgaaaggaacaccaccccacaaaaaagaaagggcctccccagcagcgaagagaatatcctcaacctgaaatttcagttacataaatgtgacaatttttagtcgctgcaacttataatggaaaaatattaacattaatggacattttagctcaaaagaaaatgaaaaaaaaaaaacttcaattgtttttaatcaagatcaaggcatcccaaaaaccaaaatctggtttttccacaacataaaaaggaaagaaggaaaaaaaaagatggagcaataaattgaaacaggagacaaaaaacaaagaaacatcaaagtaaacatcaatccaacatgaatcacactgataatacgcaaatgatataaaagacgagggagaagctgaattaccttagatcgacagagactgaaaatcaaatttagggccatatctagctgagtagatgatgtttcttttacacatatatgtccaatagatataacaatcttctgtattgctttaatgtcatcacccgagagaagcttgctcaatttatcagataacattatcagaattccatctgcagaattaatcagacacctttataatagatcaacaaatagctcaactctaggtccaaatccaaacaagtacatcagcttattagacttgactttacctgaattagaatcatcaagtggaggtaatgaaatacgtagtccaatatgacctagtgcttgcattgcagcagcagccagcgcagaagtttcagaattaactacatcaaccaggcatctaagtgtattctggagaagtatttctggcatctgcgaagatcattttatatacacaaaattcaaatatatttatagtgaaagcaatgacatgattatacccaacaattaagatttcagtttcatctgatcaaagtatatttcagaaaaggcatttgctcaaagggcagcatgttgatcaagatcaaaatcacaagtcacaattacacatgactcaaagatcatactgataaaactagcattttatgcaaaaggtgtgttaaaccataaaagtataaaatcctaaagcctattgatccaagctaaagcttgtttatagtgttctaatccatttactaattaaaaaaatgcagtaaaattatacttacaggtgttatagacaaataatttgcagttagatatcctattgcgcaaagagctccatgctgagtctcaaacctatcaataaattaattcaacatgagcatatataaaacaggtaaaaagcagcaactctcataaactgacctaaaaaattacagttccaccagtatacaaaccttgatttgtgtgtttggctgaataaggaagtcaattcagacataacatcagggatgggaagagcagaagacacaataccaagtatgcgtgcaatggattcacgagtgtcccaatccacatgacttagtagttgcttaagccatgaaacttttagggcaaaatgtgatgctaccacctataacaatatgtgtcagaaggaacacaatcaagaaagtaatcaaagaactcttacaactgacctctggcatatgtgatccaattataagcaatgccttggaagcattgacatgcaactcaacagagccttcaaatgacatagaatgctcgagaaccaaacagaatgccttcactgatgaaataaattcagatgatccttctaaggatttgttctgctccaactctgactcaaagcacttcaataaaaatttaatcatggccacatatgtatttgaaggaaaaagaaggttctgttctctagtttcactggactccaacaactttggctgttgttgaagaatgtaatccagcatcatacccagtttgggatacttaagaccaacaatttcacttccacttttaagaagacaaagaccttcaagtgccatttctctgtttcaaaccagaaaacaaaacctaatatgatttataagacttcaagttataaaaaacatcatcacttaattacaaaagaaacctaaataattataaagctaaagttacaactcaaagtttatgttataactcaaaaaaaaaaaaagttcaaaaatcatcaacatggaacaaaagtaactatttttatagcaacaaaaaacacattacaggaatcagagtctctgattattaaaaaaaagccatacaatctgaggacatgacaaattcaagaaagatggttattaaaatttaacacatttacaagacaaaatagtctttaaaaactacaactattcatgccacatacattttaatttgcatattatgatgttctgcacatgctttatagaaattatgacatttgatttgccaagaggctcaaacagttatttgatgcaatattgaaagaaatatgtaataaagggttcattatctaattgcacctcctttggaaaacaattttggaaaattatctaaaagcttttaatgaagggcatgcataataaattgacctggagagcttcttttttttttcctcttttgttgataaaataagaaaatcagttgggaggataagggatcttttccaaagtaaaaggaaaaacacaaaaaacaaagaaaaacaccaagcaaagctaaacatttgctcaaaatatctgtaagagaaatccctttaagaagactacatgctttttaactcatcatagcatgtcagttcattgctaaaggaatttgtaaaatacctgatatctaatttagcatctgatgctccaagcatacaaataaaacgacttggacaatgttgaagatcaaacaaagatgttgcccatcttacagcacaaaatcgtacttcactttcctcctgtcatcaccatgcagcatgttactgttcaaaccatatgtcctttaaattttaattagataaaaaaggatattactacatggaaataagaaataaaaggaaaatcaattgtttggagggggaaaaaaataacaaaataaagctaaaaattgcaataaaataattataatagtaacaatttcagaggatttggttatagcaaagatgccaaaaagctatgtggtgttctcaggctgcagttctttggtgtatttggttggagagaaatgcaagaatcttctattgagttcatttggcatcctgtagtttttctagcttctcaaaagggcatgtttagataaacttctccagaagcacttctaagagaagaaaaatgaaatgagcttcttcataagctaaaatcagtttatgcacacgtcaatttgtagaagctgactcatattagcttctctataagaaaatctgagtaaaattgcttgattgacatacacactcatcctagggatatatatacaggtacagaataatacataggaaaaataaatagaagcagcaatttacaacaaagaataattaggcgaataattctaactttgttccctaagttacaataaatctaggcaacttagaaagtggagtaggtttgttatttatgtaacttccaacacaactggaacaaatacgaatacaactatgccatgaacttgctcagcaaggtaatatatctgcatacagtctcctagatacgaggggaaagtcagcatgttttgtcataccacttgagaattttttagcagaagcatctccaaatcttgtaacacggctaatggggctccctgatacacaagacagttaagtacttcagtcaataaaaaatgtgcaatagaaaagagggtcaaatcccaaatcaaccaaaagtccaaaagagatcatgatctgaagtttgtaaacagagtcacaatattatgtttagcctaacacctaaagtcctaaagtttgagagaatttcaaagttatgacattaagttggtgaaagacttaaaaaatatagcacttaaaataaaaggagtctcaagaaaattgtgtttctaccctctaattttatgaaataaaagaattcaactcaaccaacataacaccaatgcaaccataaatttactatatagctttcctaatttgaataaatgacgtaatttttccaagtaatatgtttcatacctccttgaattagtgcaagagacaatagggaaatatcaatacgttgaaatgattattgttagtattatttaattatatttggctaaataagactctgttagaaggaaagaaaataattataaggacaaggaattcattcagatcaaaactaaaagccaaaacaaatcctaaaactagcggtgaacatgggtcaatttgatttgggtttcgtcttctcgaactaaaactgaattgcttcaaggatttcaggtcaagtcggttcaggttgttaccattttccggtcccaacctgaattgatccaacttggctaacttcgggtcacaaaccaaatcagttctcaggttacccatcagaaaacattaaattggaatattggggaaatgaaagagacggtcacagattcacagaacagtcacaaatcggaaaataaataaacagaatttgcatcgactgcattgtaatccatcagcgtaaggaatttcaacggatggagtcaactgagaactggtattgaaagaaacaaagaaagaaaagaaacaaacagcagcatgttgggagatctggagatggaaccatctgcaagtctttgaactaagtagccttcaaactcgccgaccttttgattcttgtcgtcaatggacaatggtggtagcgtagcggattggtagggaaaattaggggcggagcgtgtgggatcgaccatgtttgagtctgatgacattgtccctagcttggaattgaggaatcgaagcaaggtttggtaaccgtcgtgggctgtttatcgccgaagaaggaaacgcccaggtttgcttctgctgttagggcacgcaacgaagtgaaacaaaatacgaaaacactcattcactgactcactgtctcatactaaataaaataaacatgtacacataacttgggtcgggtccggtctaggatttgcaaacataaacatgttgcctgacttgacttgttcaagttgcttcttttgaaatccgaattgaaccacgagtttggtcaaaccaagttgtttaggttcgaatcaagtcgggttaatcaggttgttcaaacccatgtttaccgctacctaaaacataagttcattggttcatcgtagttatccaatctaatgtattaattttaattaacatgtgatgatcaaaaggggggttaaatcatggaacattttcctccgaaagagatggattatgttgaatataatggcagctaatcttgggctcaactttgggtgtccaatgacttataatttcttatagcatacacttgtgaaggtgcaacaagcaattttacagtacaatgagcaatgcatctcaatttactttccttacatctttgaatttcatgaaaatggagggtataattttgaggcattgaaaataggggaagcaattgtatactttttatttgtcaaaatatctatatgtcatgatatgatgtatcttgtatatgcaagtgaggtaaacataactgtgtgactaaacttgacaaactagtttcactttcacatcagatagtcatatactcaatacattttccatgacggagaatattaatgaaaaatagatttacacaagtggcagaaagaggtacatactttgtatgctgaagcaagagatatagttgcctcttgaacaacaaatcgaagagactgggattcatctttcaaggcatgaaaaagacgagcagcaatgtcaatcttttccctggaagaacagggagcagctaaattagtaactgcttaatagaactcagaaaggacctaactcatgaaaagaaattttcttttattaaagagaattatttgttacctgaaaaaagggaaatacataaaataaaataaaataaaaaatcaaatagcaaaccatcctaaaacaatgcaaatttaaaagggataaaaaaagaaagaattaaatagagagctatccaatccctttttgaaaccatagaagaaacatctctaaagaaaacatttacagacagtcccaaggaaacaaagaagacagctctatctcataatgtaatacacagatcgggagaaagagccttgtgatgcctacaagtctacaacagtgagaattattaattctatagtgtatcactgtccaaacaagagagttcacaatcgcattgcagaaagatctaatgataacttatgaatagttagattttgaaacatatattgaaagaatgaaataacaagctatggaggaactagttaccaaactggatggataactacagccctcaaccattattatttttcctataactttaagcatttactcaatgcttttatttaaaaatccaatgagctaacagggagaagttgctttcatatcccacacatttttacactccatcaaattccaactcactttctctagaaagcttcctctttcttctctttgttccatctgagaaaagcttcccctacaatacatcacccaaactcttctctttcactctttgtattttctctattgaaattcagtgctttcatttcttcctaatacccattattctactttcccacaaaatggggttcacagtttagtttgaatcattctttcaattttacatgcttgcctcttctgttgtaaagtaatatgtatattttcttcagttctcagagtagtgtaggcttggtatgtgactcgatccatagaacactgttaaaggtaagtttgacaaagaaaacaagtaaatagttttttttttttttttgctaaacttgttttcatgttttattttagtacattaaatggcacaattgtcaatatcctttgaaggcacaagggctatcagcctcatttttaaccttcctaaaaatatattataaattgttcattactttatttcaaatgttctgcaccattcagcactttcaaacatatttttggtcccatccgcacaaataagtaccaattaaaagggggggaaatatgcaaaaatggctaaaattatgaccatgagaaataaagagattggaacctgaagaggtgaggcaggcgctgtgcaattaatccaattgcctgaaatgcataagttttgacctcccgagcactggcatctgagtcaatacttaaaattaaatgtaaaataaactaattttattcaaataacattaaaaagaactttcaagtctttagcaaacctgcttctgaacttggatagttgtcgagggatttcataattccactcaaaataacaggacccattaacttaagctgatcaatttttgcctgcatttccagttacagatattaaagatgctaaggaaacaataagttatactacttcagtaaaaaacaaaaaatcatagtaaaacatgcaactgccaaagtatacatatatatgggacaaaggaggacatgacatcatttgcaatgcatcttaaattcttactaggtatatgtggtagttgatctttaagtcgattcatcatatagaggtggcattcttaagcaaaataattcaatcaaaagaaaaacaaagatttaaagccaggataagaccttttatatcatggtgaagttaacattcatgtacaaatatgcctttaaaaaaaaaaaggttcatttacaatattttaacaagaatatataggtcatgaaccaacaatctcaaatcccacctaatgcaagagcctattgggcttaaacatgaacaatgcacctgctctaccctatgctaaaatttaactttaatttagaagaacagggacaacaaggcttgaactctagaccacaaggtcataggagctccaataccaacgcacgaatcaacaatcccaaaatgcttaaactgttgggcgaaagcatataaatggtttttatgtctagcaacattatccattctacctctggtatgaaaccataaaaatttaacccacaatgtgaatatataactacatacataattgagccaatagtttatttttacatttctgccacatcagccaatagtgaagtaaaaccacatacaaaaaagctaatctagatatagaaatagaattcaccaaagtaaaattcatttcaaaccggcaattcattgcaaatttcaagcagcattttcaactgaaccacttttaaaaaaattatcttttagtagactttattttcatttaaattgaaacatttttaaagaaggaaggacaaacacttcagcacgatattaatgttcgtgtgttgtgtcagacacatatttgtacaactttttcttttatttttaaactttcacaccaataaagatgaaaacaccgtagttattagataaattgtagcattttattatatctacaatgacttctacaattatgcatgcttatttttaaaacatcaattctcttttttgatttaagatttgggtcattttatgttaatttgacataaattttatactttgcattatgataaccatagcatgttctatgattttaaaatgttatatctctatgccagtgtgatatatccatgtcctatgttgtaaccatagtttctagtttccaaacaattactaggccaagagacttttattctatgggtaaaatttatgacaaaaaacaaacgccaagaaatattgcacttacatgcttaaatacccaaacagtgaattccattcctaattgcttcaaccttgatgtggtaccgttccctattaaattcaagaatatgacaaatcaaagataaaaactgaaaaacaaaatagaacagtagaaaaaagacagagcaaaataaaatctgcacagacaacccaattatcgatccacacgttcgtatgtctcatattttgatattttgataatgaaataagaactttgtttagaacaacaagggaaaattgcaatttctaaacctatatgaaagggaagaaactttgttaatatgaaagaagcattataaacaataaaataaaaatataaaattcctatttgttattaaaatttacaaaggaagattgcatagtctataattggtacaaagttataacttataatccattttccaccttcagtgttcattccatgatttagttaagggtataccattgttgaagattagagaaattgggggcttcattagcatgatttatgtttgcacgggatcattgaatagattgtttaaatcaaagaaacaatattatcacaaaagaaatattatctcatcactttttttatttccatctttaagggtttgcacattctcattttctatatcttgattatcttctcctttctcataatagaatctatttccacaaactaacaaaaagaggaaaaaaaaaaaatcaaacaacctcaaataaaactataaaagtaatacaagttgtaagattagatatcatatatacaaaaatcatagacacagtaggccaagccatgaaattgttaatacaaatggacaagtctcgtaactatagtgcatgtgtcatggatgaatataaaatcttaactacattggccaattcttaagcaacaaaatggcctacaagttttgaagagggtgaaaaaatattagaaaatatgagctcaaaatcattaaataaaagaatattatactaccataaatgcaaccaaaaatgcactgcaaggtggatgggaaattgtttgctgctgcaatagatctgcagaatatagacattaattttgcctttaaagcaggactcccgggactcactcttgattctgaatcaatatgttcaactccaacagtacctacattcaacgtcaataatgtataaatattgaagagaaaacaaagaaatatataaaagccaaattgggttttagacataatagggcagaaaaatgaatacactttcaagatatagtaagagttctctgaaaatagaaaatgaaagtcacgcaaaatggacataaaaataacacaataaatgtctagtattgctatcaaaaacataaacacaccacaataggctatgacctgggacaaaaaaaccactaataccatcaaaaattacaatgatgtcatcctctataattattattttcatcaaaaattactcacctgtcttgggggttttaggtccatcctttctatggcaccttaattcatgtcttctatgtattagattgccataggctggttttgttatcatggactgtttctgttttcatatatttgtatctatccttttttctcatttatataatatatacttttaccgataaaaaaaaatatatattttcatagtagattaaaaaaataggaaaatgtagtgaattataatctctagataattttaaaaaatcataaccatgaacaaaagcagttaccttttgtcccattttatctctccaaattttcagaaagacttgttagcacacaaaaagaggactgaaagtgatgtgactcctcatatagtgtatgttaaagaccaactctcctaatagcttaagttgttaggtggacaactaagaattagaatggtcttatatttttcacaccttcacgcaagagcataaacaatgcataggccctttagcctttgtgttgaaatagccttaattatgaaaaatgggggagcagcaagtaatagagcattgaagatcaccgagagggcacagttcaaacttcaaacatgaaggatgagcacaaaaagttgcccagaagacacatgacattaattaattgaaatgtgaaaaataataggaagttaggaacaacctcatttgaatcaattatactcttgagcagacaaatattaaaagctaatttatgtaagaatcatgcaggctcaaatctaagattcaggtgaaactttcacctatttgcatatgatcgtgaacaaaattaagaaaaaatcaatttgcaaaaacatatttctgtatatgttaacacaatcattaataacataccattaaatagcaaaaataatctgttgatcagattcaaatcatctaaattagcaccattggccttcttctttagaagctcctcgcctctcttaataacaggctcttcacttgagttaattgatcaagcaacacatgtgatcatccacaaatgaaacaccaaaaggatataaaatcagtaagttaataagaaagtgttaaaaatgatttgagcaacacgggaactacaacataccaatctacagaggcagcaatatataaaggataaacaagctcagaggcaagctccatagcttgaatgacattcaaaatacccaactgcaccaacaaagaacaaaataagacagattaagtagctttctgagtaaatgcaagattggacatgattgtatgcgttcaaacatggaaataggacatgattgtatgcgttcaaacatggaaatactgacatgttaactagtgtattcaaatgaaaatttggaaaggtcatatgggtcagagtagaatagttaatctttagtctcagtcagttatgggtcagagtaaaatagttgatctctagtctctgtcggttgcagtagttaacggttgcttggttggttatcaaaacaactatactagcttagcatgtccgttatgaaagtgagctccaggtctcatttatttgtattacaatcatctagtatcatgacttgtatataaatatcatataatcagtatattcagaacaacacaataatatcaggttctgattctctctgaatattttatttctcttcctgcattttctaacaatcttcaaattctacgggaaaaaagtaaatagcatatcatattgagatgagggattcttgaattagacagtgtttcttctgacaagagaagaaatgtgaaggaagatacatagcagtagtagagggagttatcagtttttagaactaaagaaacaacatcaacaacatatattattcaaccttcacatggcaagataatattaaaaccattacatgattaacttacctttcttagtaaaatttcattactttgcaattgttgtttccccgtaacacgattgacttgagctactgaaagcccaggagggaatccaccactgcaacagaacaaaatctataaatagagttctaaagagagagagagagaatctgagacaaaatctttgtgaaaataaaactgagttttcactttctattcttatcttagatatggattcagagtattctgattcttatgtatacaatatttaactttgttcaacaaacttcttactcactgacagttacagcaactaccaacattccaccagaacacgaacagattaacttatgaacattctagattgcaatttacaatgaagagcaactagtaacaggaacatgcgcataaacaaaggcacatactatatactctatcaaacttccatttgattgaaataggaatttaaaagactaactagtgttagaacaaattcaaatatcataagctccgtttagcataaatccagttccatacatttgagagacccgctggtacaatattgtatgaagacaaaactcaataaacagctccctatcttgagaattgttcacttttttatactttgcagcaacttcatcaccaatttgaccagagtggcattcaccaattacctagaaggaagcagaaatccataagtagtcatttcctgaagatttataactgagggtgatctttgctattcaataggatagtgaaaggaagaacaaaagaacaactaagatatacacaatgaaaatagaccaagaaatttccttttaaaaaaggatgctggacagaagcccatggattcaagaaatccaagttctcttaagtgttggtagtagacccttcttcccatcaaaaaatccttttatttcaattcccaagcaaaaaaacttagaacttccctctaatttttcctttttatatccttcccaattcccttgaaagaaatttctccaaaactgaagccttacttggatagaataaggagaaaaagggtcccaatgcactgaacaattaatattaccaactcaaaaactgtgtaccatgaaaatgatcaatgaaaagtcttctacgactgtactcttaagttataaccgtgacaatggaagatttggtcaaagttaaatagtggatgttgataccttaacaacgattctaaggataatttcctggtgttgaagtggaagttttgagatgttcaccaagagatcaggagccagatcttccttttcctattcaaaatgcatggtacgtcagatagtatccacaataagcattcaatagcagaaaacaaaattcttcaaagagtcccaaaccaatcaatttatctatttatccgacaacaaaacataatttacttttgaaaatttaaacaactgctgaaaaaagaattatcagcatcaaaattgactttaaagccacaaaataataataacaaacagcactaagatataaagaacgagaagagacctttgcattaacacgctgaaaagccatctctatatacacaatgcagaaattccttatgatagggacagcagcagattccgaatacaatttccacaagtcagacaaaggtagaccaatttgaggctggagcttcactctcttgttcacgtgactcaaaatctcgagcacctgtcagaaacacaagtcaacaatcatgaaaaattcaccaaatcgcttcacaatatcacatcaaagaggatgaaatagaccgtgcaaaacagttgtacatgtacgcaaactcaagtgtaacacaatcttactatgccaaaccaaagttactcagtaaacactaaacagcaatagtttctatcggttcattaagcaaccacaacagcagagaggagttatttcatctagccgataaagtttgcatcaaaacacaacgaatttccgcactcgcacagtttgatgacaaatttgcatcaaagagtacatgcacgcaaactcttcgttattattcttacaagcgcaacaaatcttactatgccaaagcaaaattactctcactaaacagcgatagtttatatcgattcacacagcaaccgcaacagcagatgagagatattttcaattttcatgtaaccaattacatatgcataaccaaaacacgacgaatttacgcattgagagtttgattcggaaatggaatgtgagacagatgatgaccttgttgcgaacggcgagggattgcgaggagagagaggagatgcagagagggagaagcttggagagcagcggctccagcttggaatcgtcgcagagagccaaacgagtcagcatccgatccagcatttcttctacctccgcgtcagacttcgccaacgacgacgacgatgattcagccatttttcttttctctgtgatacctttcttcgccaacaaactcaaaactcttatttgttgtgctcttaaatatgaattagaaagagtcgctgcttgccctctacgactgctttctactcttgcttcgtagtaggactagtcgctcttctctactacctcttcttcaagtcacccctaggcccaattcggaagagaattccaactaggccaatctcaattcagaacttctctatcaaaaaaactatatttttttaataaaaactctgtcaaaaatacttatgatttaaataagattaatttatttactgaaataagtatttattttaataaaataagtgatttttagttttttgtatatttatgtaaattatttatactaaaaaatagtttttgcttattttaagaagcaaattttcttcatttcttaaaaaatacttatataaaaagtatttattttaaagttgatttttaagtttaaataaagtcaccctaataggcctttatttgcatttataatctataaactctagggtttgttttattttggggttgaatatgtatttggaaactatttttttttcaaattttatttttaatccttaaacaacaatgaccaattttaatttctttggacaacattttttttgtccttgacaacaagtatgactaagcttttgtttggtaaagtaggattaaatggaattgagaataaatatttaacttaaaagtggtagtgaagttgtgagactcactaatttaaaaactttttccttcaatttcatgcttccaaacgaaaggtaagagctatgatatagtaatgtcattgacaattacataaattgtcatgtcatcaattagtttaacatgacattcacttttttacctctcaacattttttctaggtcttaattctctcatctttttatgtaattcaactttagtacctaagataatttttttatcaatgttagtttttaaccattttttgtcattgtttttagttgtgttcatcaagtataacctttgagtgaatgagtaattatacgaaacatatggactcgtaatatagattactagtttaatgtaacaatcacactattaaatgttgttagtttgagacattttttagcaatgataagacacaacaagttttttgatgcaccaaacaaaatcatcaacccttaatatacaaaatcaacaatccactaaagcataatttaaaattcaaatcgataacttgtgataagaaaaatcacaaatcactgaaccatgaatcagaaccccaatctccaaattttttcaaacctcaatcctaaaattttatactaagtttagtgttaacttgttttttccaccataattttccctaattgaaataatttttattttaattaccaaacatcctacttttgagttaaacttggtttgacttgactcaccatctacaagatactaaacacgcaaagagattaaaaaataaagtgtttatggtctaaaacaatattttagagattaaaaaaatctaatttatgtttgtttacaattttaaaattcagtttctttaaataaacaattttttatgagaaataacttaaaatagcttttgaatttagtcaaagttggtattctttttcaacttctaattattttaaaaagttgaaataaatacctaaatattaaaataaaatatttttaaaagtttaaatatgtttttgtccctaataaatgatcaaatttttgtttggtcttttcttcatttttttgttcataacattagtgttctcttaacattggtaatgttttaaattttgaaataattaaaattttgaaataattaatccaatgacggctaaaaatggaaactatcttttattttataatgaaaatcatggtgttgctaagaaacggattacaaccaaaagccccaacccaaatggcaatccccttgacaacctccatgccaggaatcaaaggggcatgccttggctcaacaatcttatcagaggacaaagcattccccaagatgtgtagcatcccaatctcacccaagggtgttttttgcatatgcttgcatcttcttcaaacaacaaaaaccatatctagattatttttatgtcaaacccaagcctaaccctaaccccaacagatctgagacaaatgaaggctcatattcatgcagtgttttgcaaacgaaacccaatctcacaaacacacacaagtgggcttggtggtggttcattgtttaagaatgcataaagtggtgatgattttgcatgggaatcgtactcttcatcacccttcaagctctttgtcgttcctccacttcctttcgccatgatctagatatgattcagatatgaaatttaagaggcgaatctcgtgtgatgatattgttactcctcctcatctccaaagatgataacgtcggttgggacaaatttggtgggacagagcatatgtgtaccaacaacaattttgaaccacttggttgtggtggcggcgaccattgtcattgaagcgtcgtcgttgggcatgacaaagacactgacaagctccattgcatacatgtattaatggtggttcaagtgagggaagagtggaaagaaaaatgtgttgttggggaacaccggaagtgaagagtaaaaaacaatgttgttattcattatcattgagactattcttcttttagtttttatacacatttgattcttatgaccagccctaaatttagtatgtgtttgaaaaattattctctctcaacccaaagatatagattactcgcttctctgttttccattacaaattcacaatccatcaaaatatttttataggaaatgtttgtttgtgcgacaaatgaacacaaaaatactaatgtttataactttagacttaatgtttgcaaaaagagtaaaatataataattataacacataggaaatgtctgtatgtacatttagtggcaaaataaaatcctaaatttggatgcaagtgcattttatattataaatttaataaaaaaaactaattaaactgtataacacaatacaagaatgttaaaatttgtagtataagtgaagtaagcttacttaaaaaacattaaacaatggtgttttaaagttaagagaagcctagaatattaagaactccaaaatcttaaaaaaaatcaagcctaaagaaattagccagagaagtcaagaaagttgagaaaaaataagtttatgccgctacacgtgctttcacataccctgacataaaatataatcacgtgaatttacatgaaagtatcatatgtcatggcatcatacttgatatgggtaggtgccgacattattaatgatttagtgatttttttatagtgctaataaacaaaacataaccaattagggcctatataaatacaagttagaagagattttgaaactttattgaaaatatagttttatctcagaaaaaacctttcaaaaacacttccttatattcaaacagatttctagttacttttagttatctcaataattacaacctccaaccaattccctcaatatgtctcattttatcctttcctcaggcaccatgtattttgtctttactaaacttcaccactcttgaagttgccagcaacaatagaaaaaggaggggggaaaactcgagaatagataaagggacaagcaatgtatatatgatctaataaatggaaactcatatagcaataaaggattgtaattaaattgttacattattttagtttacagcaataacatatggtatatcctagctcacaattcaactcaaaaccccactgtctcactcacacccaataaaaaaatagataaaataatagtagcatatatctatatataattaaaaaataatataaaacaaatctcaactcattaaaaccagaaaagtagtattcctagtaagacaatgtgaagttgtgcatacattgagattgaaatagaactagatttctgtttgtcactatcactagctttgtcatcatcactttcttctttggggtgactgaaattagaaggaacaatagtgtctggtgctgattcatcatctccagcaacaggactagcaggagatggtgcatcttctggggatttaagactctttggcaacccttgtccataggtcacatttattttgaagtgttgtccactcttgcattggtcaccatcataatcacctgagaagaagtatgtcatcccttccttcaccaaaggaactgccactgtcacaggatgtgtttgggtgttggatggatcagctgctgaccattgggttgtgtccttgtcttgtgcatcatcataatcacattctttgtatgtagtgaaattgtatgtttgaatcactgagtggttagtgtccgtgttgaaaactgcatcaacaatacccaaaaatcaaaagttgttaggtaagattatttgatgtcataatagagcatgatagagaaaattgtatgagtaatatatgtaaccatatagtaaagtatctgtattttaatcaatcagaaatgttaaagataattactccatttgctatacacatttcatattcttagattattctttaatataaaactatttttatttctttcatgaatatttaaaatgtaattatttttattttaaaaaataaaaatagacacaaagtgtaatttctctctttcaactaatatataataattttgacgactcttataataatatatcttaaaagtcttaaaagataattttttgattgtttaatagtttaaaatttgttacaccgacaacatatagaaattatactcaaattgtattggaagatgcttgcaagaattacaacctactttcaaagcatgttattgttaggtgaaaataggatatcataaatattaataccaaacagccaacaacacctccatgttcaaagtattcaataggattatgagtagaaaaattaataatagacggcaactgtaaaaacattggcatggtctattgttcaaagaattacctacttttctgtccaactgaatgctcccctgctacacgtggaaatggtttattctaagtgtttggttcaagtcaatgtttctttttcttaatttatgcttcataaaacgtatgactttattaaatgatagcataatcatcgccaattataagtgtaatggtttatggttagcttcaatttgactaatagctataaagcaagtccctttcctcactttttccttcgtctcagaatattattattacaagttttacataaaagaaaaattaaactagtagaattgagtggccactcaatcagagtatcagaacagaatatttgtaccaaaagaaaagaataataaaaagtactactagtagttgtcacaagtcattttgggtatcggatttttcttttttcccttctacccaaaaagggacaaatggtaactaacagtaatattctttgttagctattgtgttgcgtcaaatggaagggtgaatactttagatgagactaacggttgtggttcgtgtggcagactccataaaaataccaacaagagtagtgatgctttctcttaggtcatctccaatgcagtatcttaggagagtttcttagctgacctggtagttgagcatcttatataagcaactgtatcttaaaaaaggatccaccaaaagtcagtaagaaacccatataagcttctaacattggaggtgcccttagtacttccaatttaagcctaactttttctaaatcgactaacattaatatattaagaatatggcacaacgtacccaaaaaacagcatatatgctgcagagggaaacaacccacaatagtactatgattgaagccaacctattttttgtgacactcaaaagtatgttatgctaaaacaaattccaaaataaaaatataagtaaatgatatagttttgcttctcctccatcatacagtgacgggtagagaaattgtgaagagaaaatagatactttgattgctttaaaagcaaagataaaaaaaaaaaattaaaaaaaaaaaaacattgaaaagttatggaatgagtgatgtaatatgatctgtctttgcaatccagtattttttctaaatctgattagacatcatagtagtgttgagtttcagccaaataaaaccagataaatgcaaattggacatcagatcaaggaaatgaaacaagaacaaccatgccataagaaattggctaaaaacattgacaaaaggccaaaacattaacaaaaggccaaaacattaacaacaataaaattcctcaagctctacttagccacttctttcgaagacaacaacaaaacacacaaacaaggattgtaagcagaaaaacttgcatgatgaagaaacttactgaggaaatctcctaagctgaattctttactgtcagcccacttctggtaattgacattggacttttcagtattgtcaaaccatcctaaagagtcaccaactgtgtaattcttgtaggcctcagcagatcctgagagacagaaaaaaaggaagagaagacaaggaacaattgagaacataggacgaaaagagcttattcttcttccctgttccattcttcctggggtttgtgaaaatgtatgaagcacagtgaaactggtttttaataacaagcttaagagaataagaatgtgggattcttgtgctgccagagtggttatgaagccctgactttctgctgaattactaaaatactcactgctctatcttgctctcaataatttgtgtcatagaagtatagttgttttctttgcatctttttcaatacatttaatttagtttttctgttcaactggatcccaaaaaaatagccatgtgatagttgacacgtggaatgagccaaaacggtgggtcggtgacatatcttggttagatgtctcattcattattataaactttggatataataagtgatgcttttagaatatcaaggaataaataaagggaaaactcctaatcgttcatatcttatcttcgtaggacatttctattttgattgttcttttaaaataataggccgaaatattgacaaaactagagcattttatctactgtacttctaaaggatgatccgtttaatttgttaaaaaatttataaaacattccaaacaaactaacatataatattcgattgttttgtaaatgacttaattattcttattcaaaatttattctcttcatgatgacttacttttagttagaattgagccgttccgtaagtcaattcagtatttttaacttgccttaatttgtctttagagtttagagtaatagtgactgaacattattgaagttttccttacttgtcaagattggtacgagttgttatggcttaaactaattaaattggaacaatcattgttgactccagactaaaaagctttgcagaaactaaataagggaacttgagttatcacgattttaagcaccaaactcaagttttgtcactattcgtcatatatattttatcaatcaaattacctggggaaaatagatgtatttgttacattgaaaatgacatgaattcatatcctttgatataaaatgccacccctttaacaacacagcattggttgtaccttcgttatttagtgcagtgttggaattgtacacacacaattatttcaatatagcaataaaacgatgcaactacttgggtttgactttacatttagcaagtagagaggttagttggtcctgaaaatgatgtccaaaccctaatgtgatattatgtttttcagctataatttagacaaatacacaaccgatccaaaaaaaataaaaaatacagcatatactaatatggtgtgtttaattaatatagtttttaaccaatataacaagacctattaacttttgaatttgtcaactccaactttaaggattgaagttaaggagataaaaatatgtctttatttctttaatctttgttaacatatcttgcatattaattggaaatatgatcaaagtaattcttttacgaattgaaccgtacaatcctctcttcttaaattagtttttgaagtttagttgattaagttgatctatttttagcttttaaaaaaaataaagttaaactatttctaaaaaaaatatttcttctaaactcgtatataagcaaaacaaatgttcttgtatgttaaacttaaaatataagtaaatttaactaattttaacatatttagttttatcattcttaaaatatttttatttaattctaattctatatattttcaataatttattattattcacaataacaagtttcaacaaaatacattttagaaataatcttatttttttatttgaaattataatcaggaaaattaaataattaataatatcaactaacttttaaattaataagaaattaattatttttatttatatattaatatatgagtctcaaatgtaaaggtcattgtgagaaatgtcctcagacctcaaggacaattaaaatagatacaacgaatttttcataatttaatcccataattaattcaactaattcaaacttcgatattaagattttcttaaggacaacatctatatataatttatctctacacgacgactagtaggcaaatatattttctttaaggtcatttactctctacataactacattacaatcttaaacatgtacaacatgtaaacattattttccaggaaagattttaaaaatataatcatttaaaaaaaaacatgactggtcaaaataatctaaaacctgatttaaatcaaaagctattttgcataacttatcataaattaatttttcttaaaaaagtgatttttatgattataaataagcataaattaatttatatttttatttttaaaacaaaatattaaattattttatagcaaggtcactttttttaatagataataaactcgtcctttttctttctttttttcaatgttatagaaacgaagtttctaataattttgttaagtggtaactattaatctttgtaaaagacattgttgatttcatcatctttaataaaatctcatatatatgttaacacatgcaccttctttgaatccacaaagttcataaacacacgaaacataactagaaaaatgaaccggagttttaatttagtcagacaacataattaatgttggtaaaatgcaccaacacagggaattaaaagggactatatgtgatggatgaatccttccacgattcaagcaacaaactcagactcggagtgcacttgtccaacgtcctcctcctcctcctcctcgggtcccacaacagtttcaggttccgctgttgtccctaccacctcggactctgtacctagtacttcttcttcttccattgagacattattatcaaacgcaaccttctcgcgacaaatgggacagttcatgtgtgagggtaaccacgcatcaatacaatgctggtggaaaatatgttcacattttggtagcatctttaccacatcacagtcttcaaactcgcctaagcacacggcgcactcctccgccgccacattctccttctccaccgtcgagtaaacgaagacgggacacttgtcgaccgtttcttggccgctgacgacggcgacagcggcaggcacgtctctatgggtttgggagcgaagtcgaatgcagacataagacactataaacacaaagatcccacctaagatcaaacacatcgccgcactcacacccgctgccaccttcgagttttcatcatgtagcttcagagactcgctaagccccatttctcaactgtttcagtaccaaaccaatctacaataaatttttaaattaaccatcagacgacactttctatatatatatatatatatatatatatatatatatatatatatatataagaaaaaacatattatttgagaagaatatgtattttatagataaaaaaaattaaatttaaacagtataatcaaatataaactgttaaaacttattattatgtaactatttaaaaaaaacatgtgagtttttttaaaatatatgattttttaaaattaaattttaataatttatgtataattatactgttcaaatttgattatctcattcttatatataaaaatgtttccttgtatatatgcatgtatattaaaataattaatgttattaatgatgaaaaaataattatcgttactaaacttggacattttgtatggttaatcctcacaagagaagggatgttttaactctatgaatatatatatggaggtaggtatatgaatacatatatatatatatatatatatatgattgttttaattctatgaggagtagctagctagtgatgtttggaactagctttggtggtttcttatataaaaaagaagaggaggaagaagggtccgggcggtggtggcacaaggaagtgacacgatggtagcagtatgaggcggatgcatttgctgctacatacaaaacatgttaaattaattaattacgttttagctaggtgtgctttaatttgttggtcttcaaactaataaaatattaaataatatttaaaataataaaattatataattaactagaagctaaataaagtattaaatatctatcaatttagtttttactgagagttgatatactttactaacattaggcaatgttttgaagagttttttaatacttgaggactatgtagcatgatctttaatattttaggaataacttatatagtttcattagttaaagagttatttaggagagagggtgacgcttaaggaatcgaattgatagtttatttattagataatcttaaactatcacaccaaaaaaaaaaaccgggcaaacacagtccgttggcttccatagaacaatattgtggcaacttagacctaagttgtcatattggatctttggaaaccatcacaagtgtggccggcctatatttatgtttcaatctcaaccaatttctatgtgatatataattgaattttttaatttagaaaaaagaattaataaaactcacatctattacgagctatgcaaagattatttggtatcataatacaatttacttacacatggaattaaattaagaataaactacacatatatggactaagttaataaaatgcatgtataaagattaaattaagaatgaactatacgtataaagacaagaatgcataaaagagttcaaaattaacgtatgatggtaggaaataaatcggttacggttgcacttatagtgactgatttaattaataggtttgtacacatacatgactaaattgtatgtttaatcttagttttatttttcaatctaatactgagaaagcaggtgacaaaaagaacaagaaaaaagtagctcaatttctggctttcttttagaaaaagtgaacagaacaaacgcaaattcactatcaataaaaaatagtttcttaggataaagaaattggtgatgaaaaaataaagaaaagaaatgagatattactatttcaaagtctaaatttctaaaacaacatttagttaactgaatgtagtgatttaacacatttcaaagttttaaagttggtatccatggcagcttgagaatctaaaaaaagaggttgaccgaaagagtaaaaatccataatcgtgataaatcaagattgaaaataaaaaaactacataaccttgctcatgtcatatatagataatagtggctaataacatatatcatttttactaagataaaaatgacctttctatgaggtaagagcattatttgcagttatagtagtctaattaaatggaaaataacttagaagtgagtgaagtcagcgaactatggactagagtagtttttttcttaattatgatagttaaagactttggactagagtttttttttttttttttttttttttaatgatagttaaaggcaaatatgtgtggtgttgttgtacatttaatctccaccgcttcattcttcatggactttttcttttcattaatgtgtggattctagccctttcttttggaaaataatataaaaaggctaaaattcgaattcattaatgataagaagaaaaataccatttcttttgacaactttttttaattcttttcacaccccttccttttattgtatttttctaacaccaaaaggaccctcactaatagttttctaacaccaaaaatactctcacgtccacctcatttaagccattttactttcccttccaccttatcttttcttgctccgagtactcctcatttcctttcccttcttcactgtctggtgagggttcccccaccccgcagattttacaaaaaatagttttcataattaatgtagtttcatacataaatctataatttcattttactaatatgatacgtaaactataatttctataatgtatgtacacattatggaaactaaatttcttaacgtattaatatttgagtctgtttagatgttagcttctctaaaaacacttctaaaagagaaaagtaagaagaaaaaaatgaaatgagatttttcataaactaaaataagtatttcattaggtaatttgtagatgtcatctcatcttttagagaagttacattggtgagcttctacaaattaactaatggagaacttatttttatttatggagaaacttatttcatctttttgttcttattttctttttttagaaatgcttttagagaaacttacccaatcagactatttatcttatgtgtttgtgcaaacttgaatatagcacgtaaaatatataggtgtttgctctaaagggactgattgtaccgtattgtttgtctgagtgacattagatttcttaagcaagaaattaaggttgaatactgttaaggaaaaaaaatcagagaagatatcccattaaaaataactaatcagattttctctaataaaaattaattattatcaataaaattaataattatttcactaatatcatagtcacccaaaaaagaaaattatacataaaataatggttttataatataataaataattaagataaaaaatagatactttattataaacattgcaattgttatattctctatttaattcgatattccatctccagtaaaaaacaactacaaagaaaataattatttttttgggatatacaaagtgtcctaataaattttgtctactaaacaattggctaaatagagtttaatcgaatgggaatggtaaaaatcatgacacgtacataggcgcagcgtgacttcaacgtcaatcgtcacatgactgtcttagaaaagcacttatccagctaattatcacatgcatgcacctacgcgacgtcctttcctcacaaagccacacatgcattattagcctttttaataaaaaaaaaagtgacgatttcctctcaaaattaattacttattaattttttaaaaggtttaattatcaatacatgataaatagctttcgtaaagtatgactttttaatttcttaatgcaaataacttctagccacttaattatgacaatagttaattagtaattaattttgaatctttgatcagtaattaaatttgtcatttccgatttttgatttgatcaaatatgaacttgttgggtgcctgggatatccccattttgttttatagtttccggctttctgcttttcggcatatatatatatatatatatatatatatatatatatatatatatatatataggtggttaatttccttcttgggaaaactttttagcagttgtaatgaccacaataatttgatgtttgagaaaatatttgcccccaattaaaataatgaacaaaatcagttccaccatgtacagaaggttgaaggttcagctgcatataatttatataactgttttcaatctttggatgatcaaatccggttaattctttgtttagaaacattacaaaattccttcttttgttcaaggtcacatttgccctatgtttgtcaaatttgatgccaaaatgtgtgttcccggcctcaacccttgaagagtgtggcttgttagctagtgtctttcatggagatataattgaccggtttaaattagggacagatataaaaacccatttaattaaccaataaaaaccgatgtagttaattgattaataggagttaggtttcttgaaccaggtcaattagttaagattcaattgtactacgtactaatattacgaaaattaaaaaacttcatttgaagagatcatacacatacttatttcaatattcatatctttaatttaagaaggattgatctctttcttttgaagaaatactcttaatataaactgaaaaatatgtaaaatcactcacttacagttttataattcaagtctattcttgtcattttttaataatttttttcgaggagttaggtttcttgaacaggtcaattagttaagattcaattgtactagtacgtactacgtactgatattacgaaaattaaaagaattcatttgaagagttcatacacatacttatttcaatatttatatatttaatttaagaaggattgatctctttctgttaaagaaatactcttaatataaactgaaaaatatgtaaaatccttcacttatagttttataattcaaattcattcttgtcattttttaataatttttttttctgattagatgcatctcctttatattaataatggtaaatattaattattttatgtttatattttccttaaaattagtagatattaattaatgaattctgtaaaaatattatttaaagacattaaagtaaaagtttttatcagaaagtattaaatatataaaaaatatttaatacttactttttaaaataatttaaaaatatttatttttaactttaaggcattaattagtaaaactaaccttacaaaattcatgactgaattctttagcatttgaaacaattataaaaagggtaagtcattagtgcagaaaaaggatttatattgtctcaattgctacttgggaattttatgccagtttttacaacctactattttttcgaaaattcaaaataaaaaaaatgaagtataacaatgatttattttttattatttgaattcaaaacagtttcttatttaattaaaaaagtaagaaaaagaaaatataattatataaaacccttgttttacataaaaatgttttcctcatttttttttatcgtatttgaaaatgttttcactcaaaccaaataaagagtacttttagaaaacatatattcaatttgaatgtttagtcactttgtagatatgtttaacgtaaatttattcggaatttgttttgggagggcttctattgtaaaagggtttttataaaaataagtcagaagaataacttgtttttaattacatttttttatctccttactttcttaatttcacaaattttgtcttattattaatattttctttaaaaataatttttcacggtttcaattctgctgttttaactgatttgttaacttcacatttaatatttaacaaaaatatttatatgaccctccaatggactgtcacatttgtatatttatgttgacgtgacactttatcacatatgtcacgttagaatttttctttaaaattagatgttgttaatgactgaattaaatttgtacgattaaaataacaaggtaaacaaaaatagagagatggaattcacaaaattaaaaaattaagaaaaataaaaagtacaattaaacaaaaccatcagtttttttttttttagaatgaagttcattttattaattgtgtaaatggagagaaaaaaaaagttaaaattaacagtgtactgttgaaaaaaaacgtgagaggacatatcttgtaataagtttccatggtaagagaagtgatagtaaaatattttttaatattctctttttttagttttattattaactaaaatttatcaaaaattacaaaatcataaaagaatcattaaataagataagatgtagaattcatattttaattttgtaagtttcaagacaaagcatgtttaaaagaatgtcaaataaggtattcctaatatttttttatgtttttattacccattttggttcttaaatttacaaaaagaaaaacactctattttttccatccctatacttaaaaacatcatattttagtttttacatataccattttaaatctattcaattttacatatatcattttattttcttttagtccctacaaccaggattaaaagagattaaaaatgtttataggggctaaaggaaatgcttttgagtatatgaagtaaaggagatcgaaagtttttgtaacttatagaaactaaatgaaaaatttaatcaaattacatatagcaatttaaatcaaatataacataatatttaaatctacattttggtaatacacaacaatgtccataaaatccttaaaaaaacaaagtgcataagcaaaacataacaaacaccttaaattgattttcatatttttaagaaaaataaaataaattaatgttgttttaaccattttttactaattaaaactaattttgtaatattttattgattattgactgattttaaatttttttaactaattattctcaggactgattatgtgatctatttcaactaaattggtctgacttaccagtgttttcgatccaactagccgttaattttcaaagcataggttttgaaaatcttgtcaaccccttcattaataaacatactagtattatttcatgctaaaatctattttaaaataagcaagtgttaattaaagttttaaacatattatttaaagaattcaaattaataaatgtaattagaaatattcaatacttaattgttttaaaaacaatttagaaaatttaatataaaaatttaatgataaatttagtttaacttaaaaataaatcaaaggacacttgtctaatactaagtccataactatattattatactaataattaattattatataaagtgcaaaagtgaagagaaattgaaagagtttagtgacaaaatgatccgataaagataaaaaattaaaatttaatttttgaatgtacaaaaattatgacaaatttaatgattaattaatttttaaattttataatttaatgtttaattgattataaaaaaatataatttattgttattcttaaacattataacttaataatataatgatctcacaaatttaatgctaatttatcatatttttttcacataaattagatttgtatttttcaagatcaatttatcatcacactttcacactttagggactaattttactattaaccccagaacctatttttatttgttagtactaaaaaaagggataagaacaagaagatgcaatggtagcaaaagcaggaggagcggttaaactcagggaatgagaagtgagagtaacggctataaaaaagcgcaatcaaagtgaataaacgaatagtagcctttgatgccaaagagaatccaacggtcaagattgaatataaaatcgaccgttggagttgagggcgttgtcgtataaaaaaacatagccgtagacccaaacgtttcatttctcaaaggaacaaagaaaccaagaagcaacacactgtttcatactttcgtttcgtacattcggtgtagaagcaaaagagagagagggaaaaaggttgataccaacaacaaacaaacgcagtgcttgattccgcggtggcgacaaccgacgtgagcggcggaggagaggcgcggaacggaggtcttcagggttttctgtcgtcgctgttctcgactcttggcggtgttttcgggtcaacgtctcaagaaccgcatcaaagtgttatcatggcttccagattggaacaacagcaacaacccatcaatggtttttgttcttctttttcttgttttcttgctgccggtgttgataaatgtttgaatgttttaggttttaagatttgtttggataaagtttggttttttattttttcgtttctgaaattcccccttttgtgattttttttggtgtggtttagttggtgatgagaataagcagaaaaacaagggtggtgaaggaagaaacagaagggtgctgcaggatattgggaatctcgtgggtaaacaaggccatggaaatggaattaacgtgtctaaacctgtcacaaggttttttcttttttcttttctttggaaatgttttatttttttaagctctcataatttttcttctgttttcttttgcctaattctgctcttttcttttttactaggaactttcgtgctcaactattggctaatgcacaagccgcaacagaaaagaacaaggttgttattctctttcccctgatttttttaggactttttagtttttacctatctgattttcaaagaaaccagtgaagaaatttgttttctttttggtaacggatgtgtctctaaatctgtgtgaatggttgttatccagaaattaagcactgaagtgaacaagggagcagtggtagcaactgatggcgttggtgttgggaattttgttcctgctagaaaggtggaagcagcaaagaagcctaaagaagaacctgaagtgattgtgattagctctgatgatgaatcagaagaaaagcaagctgtcaagggaaaaaaggcgagggaaaaatcttccatgaagaatggcaaggccttcagttctgtcctctctgctagaagcaaggttgatccttttttcttcattcttctgaatgtggtttgggactttgtgggttgccctttttctggtacatggtctaacagcttgttaacctcaggctgcttgtggacttccaagggattttgtggtgaacattgatgcaactgacatggacaatgaattggcagcagcggagtacatagatgatgtctacaaattttacaaagagactgaagtaatgctctatgcttttttctttgtttaatccctataatccccttttcttatgcacttcttatattatacatacgtgtatttgattttgatgaaacagaaagatggttgtgtgcatgactacatgggttcgcagccagatattaatgccaagatgaggtcaatccttgtggactggttggtagaagtgcataggaagtttgagctcatgccagaaactctttatttgaccttgaacattgtcgatcggttcctgtctgtgaaggctgtgcctagaagggagcttcagctggttggcatcagctcaatgctgatagcctcaaaatatgaagagatatgggcaccagaggtggaattccttctcttctatgatgatttatggatcatgttttgggaaagtgcttacttatgagttatggtgtggatttccaatgtatatttgcaggttaatgactttgtgtgcatatcagacaatgcttatgttagtgaacaagtgttgatgatggagaaaacaatccttaggaaacttgaatggtacttaacagttccaacaccctatcacttcttggttaggtataccaaagcctccactccatctgacaaagaggtatattttggtagttggttgttaagtttttgtttttttttaaagattccagagtggaatggcctgatgaatatgcctaattttcatcaatgtagatggagaacatggtgttttttcttgctgaacttggattgatgcattatcctactgtaatcttgtaccgcccttctctgattgctgcttctgctgtgtttgcggctcgatgtacccttggaaggagccctttctggacaaacactttgatgcactacacaggctactctgaggagcaactaaggttaatattttcttggaccagcaaatttgtattttaaaaatgcaagtagttaatgtgttttttcaacattcatgaagtgactcttgcttatttttgctgccagggattgcgccaaaatcatgggcaaccttcatgctgctgcaccaggaagtaagcttagggcagtttacaagaaattctgtaactcggatctttctgctgttgctcttctttctccagcaaaggacttgtctgcactgtcttgaacaagctttagggaagtttaggttattttaggcctcgatcatgactgttatgatctatattatatggctttgtattcgtttatacttgaacaagctttagggaagtttaggttattttaggcctcgatcatgactgttatgatctatattatatggctttgtattcgtttatatttttttttcagtgtgatacacaaagtgtttgtatttggaatttgctaggaattgcttgaagcctcaagcaaagtttgatgattctttttgtgtaaagagcagaatttgaaatattgctaggaaatattgagtgagctttgtgaactctcattttcttctcttctaatatttttgccacaatgctttcacgttgtgtggttgtttcattctcattgatggcccaaaaaagtatttgatgaagtgtctgtagatggatgtgtgtgtgatgtttcagaatatgattcttgaaggtctgtgttatatataaataactatgaaagcttaagcaatacgttcagaatatgatttcatctcgcatcatcaatattttgaataaaccactcaagtacagcatatgatgcagccagatcaatctatcaagcacaaaacaaaggtacacagtattcaccaagttttcgatcaatatcacattgtgttcacgaggacttctgaccacaagaggggagccgtttggaaacaattttgtttcaatttcagaacccagtagactttacaaagaatacataaattgaacaagctcctaaaaatttatagatttttgttacgtgtgagctagactaaattaatctgctcttcctgagaggggttgggaatagtattagtagcttcttcatcctctgtttcttctataggttcagcaggcctttggtttggaattgcaaacatgtagttgggactgattaatgtgtcctgatcaagtggaagagggataccaggtcctgctatagactttgacaatggtatcttgttgcggttatgagccaactccagaagaacctgccaagtgattacaataaacatgttatctttcaggaagacataccattgcttgaaggaaaaaaaaaacagatggtattgtgtgtcaccaaatggacagggatcctttcaggcaagcaaatatttcacgacaccgtaactatctagaaagtagaaatctattgctgagattaatattgttagttacaggtcctagtaccatgattgtcagaaagtaacagaactgaactattttcttctgataggtttttacttaagttgtagtaatagacgcctagacttcatggcttgtttgtttgaaagattttcttgccaagcttggcaagttgttagaaaggtggggcctagaaagtaattttccttctttttggatgtgaaagaaaatctaaccattgggtaaggagattgaaaagtggcaaattactaatattacctcacgagggggtggttgcgagaaactgaagttaagcttggattgaatagcaagcttaacatcatcacagtcgatttcagacttgcctgcatgctctgaatacacttgagcatccgttaattcgtcaacaatataacgataccataactcaagaaacttgtgtataacacgaggttcatagtcctccacgcccattgatttcatcaaaaacttcacaatatttgcatcccttggcatagcctcttcatctttatctgccatatctgtcacggcacccaaaaaaagcaattattgatgatttgaaacaaatggataattgaattttatgttcataaatttcaatggtgttgaaagttccaatctttgatatgggggttttgtaggaagagaaagacaaataatatgcaatagttgtgaaatggtgaattgaagaaagtgagacaaatttacaaaaataaaagggaaaagagggcaaaatgagaaaaagcattccaaggaaggatagaaacaggccagatcaagttaaacttggcgttcctatttacaaagcttgacctgtttacctgcatagcctctttttaggtttggcctaacttgtttaaaagtctggccaggtctaaaagactgtataaggtcagttaacttatcagcttaagtaggccaaataagcataagtatgccaataggcctttcatcataagaatgccagataacaatgccattgtaatctctacatgaccaccatcatgataaatgattaggtattactagattatcatggtttcaactaatctctacatgacatataatcgagtgttgttaattctttctcttaaattgaaaaacttggatgcatgtcgcctaaaaattgataagaaccatagataagataggtggtggtctgggacaacctaataatttctccaacctaaataggccacctatctgtacctacatcatattaacctattttacaaacataaacaactgcatactactaaggtgtgatcttggctaattacatcaaatcaaatttaaataattgcaaagaagtttctaagcttgaaggtgaaaaatcaatgactataaaaagctctaatgtattatccattaggagacagaatatatgtgtatatagtaaagccaatcccagaacagaacaagaagcatttagacagctagaatcacgaacaaaaacaaattcatagattgcattgataaagatattcacaaaatacaaatataaatcgaaacatgcaccactcataaaactctcaacactttcacagcagagaagggaaagagataacgaactcacgtgccggataaggctttcccgttggttttacgattctacgtcaactcacgtcggtgcggagatgagccgccgaaaaatgctatgccgaccaccgtgccggaatcggagagcttctctgctgaaaagtgaaaactccagttagatgtttatttctgaactatgattagggtttggatctaaatctaataataatgatagtgaaaaataactcacaaagtaaacaaatagtattatttaaagagaataaaatgtattttttattattaacaataaacagtaccttttttgtaattaatttttttaactgattatctcttttaatctacccttctcgtcctcttttcaaaattgaatttcaatatatatttaaatagttttaacgattagaaaatcttgtatcataatataaattattaatcataaattcaaaatttagtgtatatgttaaaaatatttatttatcacaaatattaattataatataattttatgtatttaaaaatatttatttaatataatttttaaaaatttaataatctgtatcaataaaaaatataattaatataatttttaagagatattataaaagttaataaatttattatatataatgaggtgtgatttgatagctctaatttatttacatgtattacctattttttcaaatttaaattatataaaaataaatatttatatttattcagtacattttaaaggttaaaatacaaaatttatgtaaaatgaatctttggttaatctactacttaaaataaacttctattatttttcttataactttcaaaatagaaatataaaaacagaaccttttccttcttctttttttgttagatatccctctccctcctttgagagcattccttttcacaattggatgcttgagtccaccgtttgtaattaactcagtatcctatataattaccatttctaaatcattggcggggttgtgttgtgtatataacctacctccatatgaagtcggatttgtttgtatatctgtgtttaactttaacgtaaatccttcaaatatctctagtcatgcttgcgtttttggaaaagtggaaaatcgatacttatacgtgtatactatcccacacttaggtagcgttccgatggtagaaaagaaaattaggaatgaaagtgtaaaaaatgaaagagagatgaaagggaaatcgttcagagatgcaatgaggtgaacattttaaatttaaatgatttaataggtaataaaatgaaaaaaaattaaattaaaaacatttatatgattctaattttatcctgtcttttttttttgttttaatatgttttttaacttgtgattgtgcatgagttataaaaagcaagtgacatattcaattttgctagccaaacaaagatatattcgatttctcactgagcatgcattataaaaaacaaatatttgaagagtactgctattcagtatgaatagcgtaaacacgaaacgcacgaacggttcatgacttcttgtactttgataccatttttttaaaaataaatataattaaaacattgaaaaaataaagtatattttaatggaaaaacaagtgctcaaaacaaggtttgtgtaaattgcacaaaaaaactattcgtatcaaataacatttttgatattcgaatatgtctccatcataatcaattttgctaaccataatcaaatatgaaatgcagcataatcaaatataaaaaaattattgtctgcacgtgtgcgtatcctatgagctaacaagtttaaatttgaaaacactcaaattcacatttttattgtattttttatttatcttttatctctgttttgtgaagaaaattacactcgtgaatcccattgtttctgaagatattttattgtaactttcagttcaaccgaactaatgaaagtgtgcatttcttttctttttcattgctgttataactttttccgcttctttcctactgaaaaaagacaaccttaaaagttaaggagttcctaatcaaccatcacaccttgccttgtgaattcactgaattgtgatgcctacattgatgaatgaattaaaacaatgacaatgattgcgtttgtatttgttttttcaaatgaaaattgagaataaaaagacaagaacatgattgagataaggaactagcagccccttggcccttcccatgtgtacatgtcctactcaacggagatttttgctcttttaggaatattttttatttaaattttgtaattttttaatttaagatgtcgtaaaaattagaaaaaatctaaattcaaataacaaatcactatcaagatatttacatagcatagaaaaagaagggcttataagttccccgcatgtatcaataactttagcaaaaacttaaagattttattagattaataaaaataaattaaggttgaaaagtaattcgttgtgcttaacttgaggtgaaggcccaacgcaaataattgagatgcagtaggggatggaatctctaaagacattctaacaccaagtcaatgaatttccccccaacaaaataaaaatgtgaaaaattgcttatttggttaggttttagttagagtaagaggcaatatcatattttgcctaacagcatgcaatgcgtaagtggtttgtggttacatcaaatgaatattttggaacctgtgaatgtcatacaaattgtatgatcataatgtgtgagatcctctgggtctcatgtaaagtagagttcattagagtataatgtcatttaaaagcaagtgcatccaattaagttggaaggataatatattacccaaattgtatctttcatcctctagactaatgtgaaaatatagtcatgataaacccttaattagccactacatgcatctatctattgttcattgaaaaaattgttattaatatagatacccaacttcataagtaattaaatgtatagaggcccaataggtgtcagaaaaatataagaatatagccattatagcaaattagaaacgcagttattgtagctaaaagaattagcagcgcgataattccatttaatgtataaagacctaatggtaataagcaattaattgtgattgattctgaaataggtttattaggaaagaattattttttattgcaatatatcaagtgtccaatgtatgccataataattcatatgtgcacacgttgtggaaggggaatatgctcttgcatcattggagcaatgatttcaaaatttactggataacagttatttattatgcttatttgtaagctgcataggtaaaagttagttttttcttcttgcagttgttggtgatgtatttcttgtatagattcaatgaaaacataacagagaaaaatatttttctcaaagtaatttattttaactttccaataatgtacatactttcttatgaattgacttcccgtttcgtatgcatttttttttataaaatttctttgttgatagtgatttttacagcttgttgatagtgattagtgagtgccaaccgtcacactattaccgattacgcgatttcttttctcaaaattattcttaattaccaacacaaatcccgttcaacaggtttcacctgtgcttttgcatggattctgttattatataaacctcaaaagttttgagggttaaataaaataattttttcacctcaacaattattgagacttactctaaggagagtttggtaggagttttttttttttttttttcatattcaaaaaatatgattccttagaaaactgattatgagaaattatgactcttgagaatatgtttgattaatcttaatatattttttatgagttaaagattcatataaaatagataagtgtaactttctctttatttggaaaagttggatttctactcgtttttgggaatatttttgcaaaaagtgagctaaaattgatttcttaattataatttctgacaatctttttttattaattgtatattaaatatgagaatcattgttttttattttaagatttcttagaaaagtagaaacttttcatctaccaaccaatgcacataaaaactattattagcatatcaaattctttctacttatattaaaaaaaatatgtgttattattataaattttcttatactatcaactaaaaagaaattatgtaagcattacttctaaaataatcatgacaaaattaacatcaacaaataagacaaaatcataatgttatcgtattagttcaagacttcctagatttatatgtaaaaaataatttatttaatcagagaatttatatttaatttttttatatttaaatttttcttgcatcagcgataatcatatcctataaacaggattagtgtctgaagttagaatacatacttagtatactaaggataaatttattattatttaataacaatataaagtctacaatggatgtatatactgtttatttatttacttaaaaaagcttataattgtgagaagttttccttgactccactggcaccaccaacaaatcccagtcaaataactaacacggaaagcaacctccaatgcattgaacgtgaataatataattgcagacgaaacattagaaaaagaagaaaaagagagagggttggcactcttaaatttttttgaagcaaaaaaaaagaaaatggaagctgtgtgagtgaagtaaacgttgaacagctaggaaggccatggaatgggaccctgaaatggacgagatttaagtttaaagcataagcatgatgaaaggtaatggtaatggtagtagcaatactactagttgtaatagcaacaaacataacaaatagttgtagttgtatgtaacatctttaagacaaggatccaagtaagcctagttccattcaaagctgttgttgtttttgtggttgtggccaacgttcacacaaagacaacacaacataacacaaaacgttaacactaaaatcccgtaaagggggggtcacttcacccacgggcggcacaacacaacctattctttttccctttgcttcctcttttcaaaaagcaaagctttcatctttctctctatccatatgctgtgtatatgcttattctctctgttctctctctctctaaaaccattgatctgaccactgcttgtgtactatagccaaattggagaaaaccattttgcatctgatcccagaatcactagcctagctaccgattttctaccttctcatgacctgtaagttaaagttttcttctttttgtctttttcctgttacccttttcctcactgcttcaactcaaaaaaaaaaaaaaaaaaggaattgcggggttttgtttccttgcggaaaactttcaaaatatgctttgacttcagtaggcctattgggttgtggtgttatggtatctctatttattagtttctcatttttattatgctttgttttgttttgtactttttgtttttgttctcttcatgtatatatctgagtatgtgcatgttccctttttttttttcttttaattattctaagctataatttgttgaatttcctttgctaaagggcgtgtttttgtgattggcagaggtaattggttgtgaaaaatgacgaggttgactcgtgattttggtgatacaatgcaaagggaggctgtgcctgcggtttattctgatgttctgtttgcttctaatcggtttcctaattacagaattggagctaacaatcagataatagagacaaaggatgacccaaaagtgctatcaatgaaggatgttgttgcacgtgagactgcacagctgttggaacagcataatcgtctctccgttcgcgaccttgctagtaaattcgagaagggtttggcggccgcggctaagttgtctgaagaggttacccttccttctggttgaaattcatttccccccctaggaatatagttcttccttttggagggttttgcaacctgagattcttattgtaaaatgtttgcaactgaaataaccaatgatcatattcgtagtttcctaataaactgatgtcccttttttaactagctttttgtatgctggtgaagttcaggctagacttagagagacagcatcattggaaaaacatgttcttttgaagaagcttagagatgcacttgaatccttaaaagggcgtgtggcaggcagaaacaaggatgatgtagaagaaactattgcgatggttagttctttttttttttaaagaagatatatacttcacatttgtttctatctaacagatatatgttcatatttattctgtatgaagctgacagtataaatataaagtcttgtttgttctctttaaaagtcaaattgggagtgtgtatgtgaggaatggaaaggctttgagaatgaacttgggaatactttttactaaattttgcataagcttgtagaagaaaaatttattatctagataatactaaataccttcattgcttcaatcacagaaaaataattttaatttttttaatggaatattcatcctggtgctagtttttttgtgcatttgcaatctttttaagagatgcaactgtaacttattttgtgcattcttcaggttgaagctctagcagttcagttgactcagagggaaggggaactaatacaagagaaggcagaggtgaagaagcttgcaaattttcttaagcaggtgaattaactttttatgtggtgatggaagaagttttattagaaataggaagaaaagaagaaaggagtaaagaaatatgttgttagtttatatcttctttatatgcctgcataaagaaatttcctttaccaatgctgagaatttatattaatttataggcttctgaagatgccaagaaacttgttgatgaggaaagagcttttgctcgtgctgaaatagaggatgccagagcagcagttcaaagagtggaagaggcacttcaagaacatgagagaatgtctcaagcttccgggaaacaggtttgtgatatttacttgtcatttgtcatgttttatcatggggaatttagtaattcatgatgccataatgataagtgcatccgacttaaatatcatattcttaagattttattttattgtttaaaattattcttcaatgtttcttgcatttatgtttttcctcccttctagttttctgttctgcttgaaagcctggagccctggactaaacatcttactcttttggcaattgttattatgtgatacccttgagctactgcttcccctttctatgcattgttagtaataatcatttgaataacatttggctctatggttaggacctggagcaattaacgagggaggttcaagaggctcgaagaattaaaatgctgcatcagccaagcaaggtatatattgaacacatgtccctattttgtctctcatatatctgctatttcaaatgccttctctttttctaggttccatttgtcttgggtgtgccaatctcttaattgttttcctgtatagaattggctttcttccctttattttcttagacttcatttttctttgtcgttaacattttatcaagttatttcaaagtgatgaatacattgattgttgattgatatataggtcatggatatggaacatgagcttcaagcattgagggctcaacttgcagagaagactagacagtatcttcaacttcagaaggaggtatgcctgtcatcttatgccatgtcgaaaagattattttgtgaaatgcatccatggtcaattctttgatattttctcagcattatgtggaagactttaagctgttagttttttaattagcatgttatgatgaatcacattatgtaacttcaatttggtttttggtttggcggttgagaatccgtgttcataacatggtttgacatcatgcacggattatgtggataatatgctttttcgattgttgtgtgtgtatcacaactattggggcattttatgtcatctatgcttcaggtcatgcagcgaatactttcatgctgttaaattctctggcaatactgaaaatctggtcctataattctttcatatttcttttatttttctattagtgatgtaaaaaaaaaaaaagaaactaaatacaatatgaaaaacatcaaacatgtgaattttcatattcctttgctgctgtatatgatctttagatagacttgggggaatcttctaatgtcttacacggtgtgatggaaaattccatgatggtttttaatgatatgaataagaattagaatttgggatttgatgttaaactatattgttgtcttaagtgaatgttaagtttctttccttaaatggaagactttcgtgattgtcttccattgaccattgtaatcttcttttactgattatccttgatgctactgttcagttaacaaggacgaagaaaggtggggaaaatgttccacatttatatgaacttgaagggaatgaaacgttaggttcttatttgcaaattcaaccttgctctgataatgcccctgaagtttcaaaatgttcaattcagtggtatcgtgtatcatctgatggtgccaaaaaagaacttatctcaggtattgtttctgtggttttctttttctttttttgttgagtatgcaagtcaattgactcttggtttatgcatttttcaacttctggtataacactttttattatgtcacttcccgggagcagaatgtgaataacagttttggtgacagcaactcgatccttagtatttgtagaaaattataaatgacatactggcagcactcaaaccctcacctactgataaacttgttaacttttttcatcatagatgtatgttcaaactgattgcttgttttgtgtatatactaatgattttttttttattcatacatctgacttgctttttgtggctattatacattaatgttaatcaatcagaatcttaactgtcagtggggcttattatgtaagctgttctgttcaagatactggaaggctgattgttattaaacatgtcatccaattagttctttgtttttatctttgcttatcatataatacaactttctcaggagcaaccaaaacagtttatgcccctgaaccttttgatgttggacgcatattgcaagttgatattatttcagaaagcgagcacgtcacactttcaaccgctggtccaatagatccaggtctggtttcaatttgagttgtcctcatttgcattagtagtcatttacaggcattgcttctatatatttgtttctatttcaaacataaagttgttttcttatcagttaagagattgaaacatgtgttctgaaatcatgtcgagcttaaatttatttcgtactcttatgcagctgctggtttgggaacctatgtagaggcactagtgcgcaaacatgacactgaattcaacgtatgttgctcttatccttttaacttttatataattatatgaaagccttgttaaattgagctgttttttgactgaaatgtgtatggttccatgggttgttgctgacttgcttcagtcttgtaatcaaaattttaaaagtagtgtttagttttgacgaattgctgttgtcttgtactttttctccacattccaatataaaaagtttagaagtcaaatctagtcagattatgtgacaataatattgtagttgcatttactactttgcaggtggttgtaacacagatgaatggttcacatcatccaactgaatctattcatgtgcttcatgttggaaagatgaggattaaactttgtaaaggaaagacaacaattgccaaagaatactattcaagttcaatgcaggtatttcaaatagttgatgatatctatattttgattttgacaagcaaaacaatgttctaacctctttcttgcacatagtttaactaacattgtgcattgaagaattatttgaagccattttgatgtttatgaaaatacatatgttttcatgctcttttgaatgtgttatcctcccttgtcatttatgataaactggaatttggtcaaccattgtgctttgatcttgttttctttagctttgtggagttcgcggaggtggaaatgctgctgcacaagcactattttggcagccaaagcagggacattcttttgtattagcttttgaatcagagagagaaaggaatgctgccatcatgcttgcaaggagatttgcatttgactgtaatgtatgtctttctgaaacttaaatatatgttaattcaacttttctctaatattttttttggtcaccatttctaaattgcaaatgcaaataatgccagatcatgcttgctggaccagatgacagagctcctctagggacatgatgagcctccttacatcttatttccccccttgtaattatgagttttttctaccttgtattataagtgttatttcaacagtaaaatctacattgctatattggtaagttagtaatgattcataccttgtggtctgaatcatttatataattttgtttcatcagtccaaggcatttttttatttgcctttgtgagtcgtaagttttaggttacattataattataatagaatccgtggctgccatgtcgaagtgtttgagatgctaattggttgtatttgatagacagacattcagacaatttacagagaattctgattgcattttgtctatggacactggcctcgacaggacaatatgtgaatctaccctcattatgtaatataatataagagaatccaatgtatattgctagatttacctcaaaagaatccaatgtagtgtccaagatactataaaatagaaatgtttttgtctactgcctaggcctaccattacaactgtatatgtatgggaggtttatccataatattttttttggtaaatgaggtttatccataaattaggaattctcagcaataaccaaaaaaagagagaaagaaatagcagaagagtaaaatcttaaagtctgattaatctattattattagcctttgactttgagctatttgtttggtgtaatgtgtgtaactctgtaatgttaattggaagctaactgctattagctctaaaatttctcatcaatgaacagtgagattctacatttcttctctaaaataaacaaagaataatcaacttataagttaatcaagcagcttataaacaactagagtgacttgttaaacacactctacatctttttgacaaaaatcaatatattcatctattgcaattctacaataactaaaaaaacaaaaattctttgtatttagagaatacttttaatttggtccttcaaagttatacgcatcacttcattagtttgattttttagattttgattactaaattaaagtttttaaaactcttttttgtcactactttaagtcatttttttgttaccaaattaatctttcaatttattttagtccttcaaagtggtttactttggtccttcaaagttatatgcatcacttaattagttttttatttgcttaaattttgattaataaattatttttctaaaatctcttttttggtactatttttaataaaaatttcgtataaaattaatcctaatttaggttacttaagcttaaaaattcctaattatcccacttaataaaataaatttttttattaacctagcttacttaaaatcaaacgggacaagttaaattatagttaatattgttgatattacctgtaatttcttaatttgaaattagggcttttatttttatcttaattaaattttataattaatgtgtttctaaggtctattttttttatctgaatcgaatacaagttagtatttgcatttcaaaataggaaatgatacacaaaattaagtatattgcaacattagtatagaaaattttaggtttagctgcagtgttttctcgcgaattttgttctcatatattttttttttgtgtgaaattttcctttaaaatttacaaaaagtcacaaattgtcttaaactacactggcataaaatttgtgaaaacataatttaggaggcaaaatttgcgaaattgtgtaactttggaggtataaaatacagtcaaaccaaaattttacattcacaatgtatgaagattaaacttaatttttaaaataccaatatactaataattcatataattttaaatgattaaattaaaaattatttttgtaggtagcgataaacagaacatttctgttctatctgtcattcttccagaccttcatttttatgttattttaattgaaataataaaaaatattgaatagtgaggattgtttaattaaaattcgaaataaaaaaatgagtcgacgtgtctcttttgacatatgtgaatgagtaatcgttatatttttattttacttcaaaagaatttcaaatttgtttgtataatattatttttatcaattaattaatttattaatttctaaaacttgaaaatatatttaaaatttgactattcttttattaagtcgtttaattatcaataatttaaactcaataattaataagtttttaatcaaatatagacttttttttcttcttaactttgtaattgtaacgttaataaagttgaaatattgagaaagtgagtggttggtcggtgtctattcaaacaataaacaatgtggcagtcacatgtgcattccgtgtggaccatgctttacagagtggaatggtcggttttatggtcaaaccaaccctgacttcaatcaacggctaccattcttcatgtctctgtagcaaatgtctgacccttgatgtaatccaagactttgatgatattgttttttacaattttgtattttttttataatttatttaattatttcccccctacaaaatcttgatctctctgctgactgctgttgtggagtggtgttgtgttttgttaatctcattcagacattcacagttatactctctctcttttcacttggatcactgatctcatctcacttttcaggtacttctctactctctttctcatgtttctactttattcccactatatgtatgattcagctttaggccaattagaccatgcttcattttggatttttgtagagtcggtatcttatattctacttaattgatcaagcattgacctcatgattctgggtatcttccattttgattactgggaaatccattgacaaaaagtaattacataaaaaaaatagtactacccttatatggaatgatgagttttgctgcattttttggagcatggagatctaaagtttgtattttgaatgatatgtttgtatctaatgctaatgcaagtgatccagaatgttacagtgttttcttttgtaaataattgatcggatagttaaattgtgactctttggttgactttgatttgttgtgtgatctgattggatcatgctcaagctaactgttgtgtgcatttactatctgcgatttagatatgtcgacatctgataagccagaagtggtggaaaggggtagcaaggatgaaaagcacaaggaagatgatcaagaggaggggaagggtggattcattgagaaggtgaaggatttcattcatgacattggtgagaagattgaggaagctattgggtttgggaagccaactgctgacgttactgcgatacacattccatcgattaatcttcacaaggcagatcttgttgttgatgtgctcatcaagaacccgaatccggtgccaatccctctgattgacatcgattacttggttgacagtgatgaaaggaagctagtttccggaatgataccggatgcgggtaccatccatgcacatggagagcagactgtcaaaattcctgtcactttgatttatgatgacatcaagcaaacatatgctgatattaaacctggaagcatcattccttatagggtgaaggttagtctcatttttgatgttcccatcttgggaaggctaactcttcctttggagaaaactggagaaatccccataccatacaagcctgatattgatcttgagaagattcattttgaaaggttctcttttgaagagacaattgcaactcttcatttgaagttggaaaacaagaatgatttcgaccttggcctcaatgcgctcgattacgaggtctggcttggtgatgttagcattggtggtgcagaactcaccaagtctgctaaaattgagaaaagtggcattagttatattgatattccaattaccttcaggcctaaggattttggctctacactctgggacatgattagaggaaggggaataggttacaccatgaaaggacatattgatgttgacactccctttggagcaatgaagttacccatcagcaaagaaggtggtactacccgtcttaagaaaaagaaggaagatcgtgattatgacgacaatgacgatgatgaggtacggcaatctacatatcctgttttccactttctctagaaaattacaaggtattggtatgcaactatgcatatcagcatatatatgcaggttaatgaattgaacgcatttgaatgttcaatcattaatcataaataacaaaatgtcatcttttttatttgttattgtgcatgcatatatatgtttataaggtaaactgcatggaagtttcttttaaacactggtggcaatatcttcctctatccctggcttcacagtctgagtggaactttagataccaacacaatcattctctactagacatatgagtattgttacattgctttggggagcttgctttcaattaacatatatggccattgtcaatgtcttgcatatttttaatataattgaaatgattcagaatcaagtattgtaaaactttatctccacttagttggaaagctaatagatttagtgaacaatttcttgtcttaaattttctatatatatgcaaaaaagttttatctgaagtcgtgctgcgcttccctaaactaactcttggtaatgtgactaagcaggtcaatctattttctttatcttcttgtataagttgtatttggttgtgccataacttttgtctattatctttttctctgcaggattgaagaattgtagcaggttattactagctattaataaaagcaggcattactttctgagttctgatggccaatttttatgtatcttgagagatcaagttgacattcaaattatgtgctattatcagtattttagtgaacacatgctgctgcagtccggcttgtgctctctcttgaaactttcttgttgtacttaattgatggtcatgacaagctagtgctgttttaatgtgagataaaagatcattttccttgaaactttgtgtgtggtcggttttatttattgtatctaagaggtggggttttgctttgtcattccggaattgagaattgactatggcttctttttagggtcgtgtcatgtgtgtggtttctattagcctgctgcgcctgctggtataaatcaaacagttctattgaaaagtttggaagtttgctcgtaccaaattaacaacatgaaaacactacaaagttttgtgcctgtcctggtctgagtattaagacaaaaagtgcatctacctagtaattgctatacatccgcaattcagagttcgaccatagagagaaggttctctcctagattcacatctattgtgccaaaatacctgtaattcttgattcaatgatgagcatatctgaaattaatgccgtaaggaatgatatttcaaaattgtaaactcaaaattgtttcccatgcattttacaaaatggtgtttttggaatttatgtctgattcatggagaagttcagaagttcacttttaactttggaagttagaaaatttattttcaatggccttggaaatgtaaaaagtagtaattagtttgtattactccctttcgactcatataaataaaaataaccaattacataaattaagaaaattagttaatatcatttagttttactaatctcaatttaaaaaataagattatttttaaaatatccttaattgaaattatcatatataaaagagtcattaaaaatataattagagttaaatgaatactattttataaatgataacattaaatatgataaaattagttagatttacttatgattaatttcaacatacaatatcattttttgtttatatatgagtttaaggaattagtatctaagaagttgtttagttaatcattcgctataaatataagtctctgaaaaaagagacacttcaagatagagggggttgtgtatttaagcagaagaaatacgagtctaggagatgtgagagatctcttatgagaatgaatattgtcattccttaaatcttgatcaacttgagtttataagatgatacatattaattacagaggttttttcaaaattggttataagacttataatttttttagataacagataattttgttgtagtaggtatcttgtcctgtttactatagagaagataaatagagtcgatgaagaaaaaaaaaaactagaaataaaagatgtttgattaaagataaatatagagaatagactaagagagatgagtaaaaataggtgaaatatgaaaagaaatgcaatagaaaaaaaaatttgaattagaataaaagaggtgtgagacacactaaatagtaaaaatttatcttcaattccctgtcccttcttaacaaccaaattaaactcaccccaaaagatgttgtgtcatttttttaatatcttttttatctatgatgtaatgaaagtagttttatctaacacagcgccacatgtctttattttgggtgattttgtttaaatttaaaaattaatattaaaataagtattttttatataaatatttttgtaagaaacatataagatttatttattaaataagcacaatttttttaaaataaatgcaatattttagacaaacacactaaaaaataaaaattatttattttattaaaataaacacttattttaaccatacgtttaaataaactggtactttatttggttttgaatattagcaccaaaattagccatgagttgatcacaaatgtatacaatttttttttttttttgaagagtgtaggcaatgtagactttagtgtccgcaatttttaagcggcgtaaattacatgactgcctcggaaactaatgctgatttgattcaattaatgaacaggtatattatactgtgacatatatccattatatagagaaagttaataaccatatatataatgcaaattctcgaatatagaattaatttaatatcgatctaaatattgctcgaaagccaatatggatcaataatatccttaagatattaattaagaaattaaaaagagaaatttttattaaaatatataaaattttattgtttataactttttttacacacttttacaattttcataataaatatttttttcttttaatctcttaatcaatattctaaaaatactggttagtaagactcataatctaaatatgggcccacctaacataaaatatttaatttttggaaaaaaagttaattaaaaattattattttagactctaattatataaagagaaagttggtaaaaaaattaacatatgaaacttgtagaatttgtaaactaaatacaccttttttttgctaagtatacccggtcactttagtttattttttttaatgaaaatattcttcatgaaaacgtgaaaatgcatttccattgattttgaaataaaataaaaacacatttatattgtatcgtgtttaatacaaaatgtatttccattttattgttatgaactaatataaaatgaaaacagattctatttttagtataaactcaacaataaaacaaaagtacattttcattctatattttgacaaacaaaacaaaaatatgttttcgttttgtgtaagttatttttttaaaactaatcaaattaatgatgacgtaaatgatattttctaattgaaaataaattaattatgatataatttatgatttttatagtagccaaattaagtatgatataaaatttttaattgaaattcaataaaagagaatataaattacctttataatagtaatcaaaataattatttaaaattatattttcatagcaattgaatttagtaaaaataaataaaaattgaattaattacgacacaaatttgtatcatgattaatttgattattattagaaaggataacttgctttaatttgacattaatttgttcaattaataaaaaaattcttttacaatcttaatttgattactcgtcatccatttaatttcaattaaaaagaacctaatttactcaattgaaatttgggagatcaaattggacaatttcaattaaaaagggaccattccatcgtgtatacaagtatatacaacatagaaagacaactatttgttgttttttcccccatatttagtgtcctatcaaaagaaaattgaatttggaaaaaaataagctggcaatattattcaaatgaagaaaaataaaataaaaaacgttccaatctcttccatgaatgtgaatataacattaacgagaagctgatcaacggtataaccaccaccttgtggtttaggcgtgacaaggcagtttgacttgttatgtatatttgtaattcttgtttcggttaattagatgaaataagctactaaaaaacccgttatatatatagttatgatttgttatgacaatgttccaaagtcatgatgctaagaaactagtctgtcacaactcacaccaactaatgtggccacctcaaatgagcaatatataaaaaagacttagtgtgaatagcttcatttgtgattctgatttgataataacgattatcattcattccattctagctagctactgtatttccttcttcaataatcttgaaacatccatcatcatggggacaaacgataccctattcagcataaacagaacaatttacagtagagttgtgttcgacgactacaattcagacccagacagaagattccttttctataatattaccatggacatgccatccaagatagtatccgatggcatatggggtaacagagattatggtgctttagtttcaagagcaacaatgccactgttggagatccaaattctctgcattttcgtcatcacgcaatgctttcatttggtgcttaggcgcctaggcttcccttatttcgtttcacaaatgatggtatgtatatatgctttgtccattctcctctctgttactgcatgcaggtctcatacaagaacatgcatgccacatgacatatttgtggcacaacatgttaattacatagaaaaacactattttctaatagcctttcatgtttgcgtatgtgtttaggtagaggcgctttcatgtttttattttatatatatgttctcttgtatctgttttggccaaactttgacactttttatgtcatttggtctttactaatatatattttttgcctataaaaaaactattttctaatagcatatgcatgcatgtcattgttatatatatatatatatatatatatgtgtgtgtgtgtgtgtgtgtgttttttaaagaaaaatcatataatatcaatccatatactatatatagataggattgaacttaggaataaataaattagataaaaagttggggtagcatatatagcaactttaagataaatatttatttattacatagattattgagatgaaactaattccttgtaagtgttaatatagatcgaaatgaaataatttgtagcctaacatgcaataaaaatgttaatttccaaatgaattggtgcatgcaggctgggtttgttctaggcccttctctgaagatagaggcattgagaaaaatcaaagtgttgttattcccttacgggagtgaagacgtgttgaacctagtatcagggtttggttacgcattattcctgttcctgaacggggtgaagatggatttcagcatgataacgagaacagggaagaaagcttggacaatcgctctttcgtcccttatgattcccactttcattggtctcttggtatgctacagtttgatggggcaggcgcaaaaagccctaggagagttcgatggaggaaagctacccgtgatagtaatagggcacagtggttgttccttccctgtggtagcttctctactctctgatcttgagatattgaactctgaacttggtcgcttagcactctcagcagcacttgtcatggatgtgataagccaagttgtgacaggactaggcactgctgttgtgagcagccttagactcgattctcatgatcattcccaagggaagggacctgaacttgcaacctacacagccacaaaatacttcatttttatagcattaacaattgtgaccgcacgccccgcaatgaggtggattgtgagcaacacacaagaaggaagacctgtgaagaaagcatacatgtacattgtgttcctcatgaccctttgcgcaggcttgcttggagtgtgggctaatcagactgtgttaggtgggatgttactctttggtcttcttgtgccagaaggtcctccattgggctcgcaattggtcaagcagtttgagatgatcaacacatggttccttttgccaatctttgtcacatgttgtgccatgaaggtcgatatttccacgcttaagagtggcaccttggttctcgttgtggtctccataattgtttctgtgcatttggttaagatgcttctaactgttggaatttgccggtattgcaacatgcccaaaacggatggtttgtgcctcgctctcatgttgagttgcaaaggtgtcgttgactacgtcacccacatctttctatttgattcaatggtaccacacaatatattagaataactttatttccttctcatatatatatatatatatatatatatatatatatatatatatcacaaaaataataaattaaagtatcctttttcaaaaaattaattgaattcttatatcataatattcttgaatttaggtattttatatttatttaaagaaaatgactgtattatatatagtccaagactatatgatcctaattaatattgattaacttaacgagaatgagattggtggagatcacatgatattaaatcatttgatccgactaatcttcatataatacatgatcttgaattttacaataattttatctttttttatgactaatattaaaagagatatagattaaaataggtaaatacttgtttaacttaactataaaactagctagctagtaatctaattttggtcctcatgcaatgcagttaatgagcaatgaaacagtctccgtgatggctatatcagtgcttgtgttgggaagcattgcacgcattggggtgaaatctctatacaacccagcaaggaagtacgcagggtatcagaaaaggaacatactgagcttgaaacccaactcagagcttcgggtggttgcatgcatccagaaaccaagccacataaattccgtaaaaaacgctcttgacatttggtgccccacaataacaaaccctttagtggttcacgtcttgcatttgatggagttagttggcagatcctctcccatcttcatctcacaccgtctccaagaaagggctatcccaagccacattaaatactctgaagatgtcattgtggcattcgacctctttgaacatgacaatgctggcactgcatcagttagcacctacacagccatatctccactacgtttcatgcatgatgatatttgttaccttgcattggacaaacttgcttccatcatcttacttccatttcacataagatggggcgaggatggtggtattgaatcaactgatgaaaacatgagaactctcaactctaaggtacttgagagagcaccatgctccgtggggattctcgtgaatcgaggctcttcttcttcatcatcatcaatgaagcaaatagcagtgatctttctggggggttcagatgatagagaggcactgtgcttggctaagaggaccatcaaagattgtgattgtaacttggttgtgtaccacttggtttctagccaaagtgaggtggcaaactgggacctcatgttggatgatgaggtgctaaaaagtgttcaggggtattatggtaccatcgagaatgtgtcatacgaaaagattgctattgaggaatcttctcagaccagtgcttttgtgtctgatattgcaaaccagcatgattttttcatagttgggagacgtaatgggatcaaatcgcctcagacagcagcacttgagagttggacagagttttctgagttgggtgtgattggagatttgcttgcttcctctgataccaatactaatgcttcaattctagttgtgcaacaacaacaaatgcctaagtcgttgtgaccaaagcgattcatatatatacattgtaatcagaaaaagttaattactgctccttttcatatacaaaaggattcgaatgttgtagctcatttttgtaatgatcagcaaaattaaataaaaaatttatgcaacacttttgtagatgctttctaatatttcaatacaagttttggtgaaagatcgaaaaggaattggattaaaaagtgttagtagaggattacatgccaaaataaaacttattatttgtcaactttgaacttttcttttgcaaacacatgaaactcataacaacaaattaaagtccattatatcatcattaagataaaatggaaacccataactacaaaacaagaaaaagcatatccattgaaaatatatatcatagggtggtttacatatagttgtgcagatataaaacacatcatagtcttcaagctccattgcaatcacaaaccacttgatttgctcttccctcctatatatggaagttcctatggcagccacatgtagcacaagtcagagctgcatcagtgccttccgcaccacttgctacgaactccctgcagccatccaaaacatatcttccaaccctacacgcatgattccttcggcactcgctatataatggattgtgtgggcatctcctgatcattgtatgttatccttcaaattctctaccttcaactgcaaagttgttgtaaaaaataattgttagtggagaattaaaattgtagcctgagttacaaacaaatcataaatcataaatagacagatagaaagaaaaaatgagagacagagatagaggcagtgtgtgtgagagagagagagtacagcttattgtgtaacgggtatgaagagccctaacaataataaaaggagtattatacataatgactagtctgatctggatccattttgaagtttaaaagtaatttttatatttgagtcctagtctaatatagttctccccttttctttttattcttttaactttttaaattgcaaaaattgttaactaaagtttaataatcaagcaaaattttaattctttcaatcactatcttgcattatagttgatgaaatttaatgtataaaattttattttttaagatattcttttgacaatgacaataattacaagtattattattttataaatattgcatgcatgtaaaaaaatcaatttttaatatagtttaatacatctaatatatagggcattaattttttgttagtatttaactgttaattaaagtgtattaatcaagcaatttcttcgtctcacttaatggcaattcattcgatcactatcatgcaacataatttatctcaaattgaatctagaaatttctaatttttaattcttttatacaatgaacacaattgaaaatattattaataaaattctgcaaacattacatgcatgtaaaatagaataatttttgaaaaatgtaatacttctaatagggcattaatttcttttgtttcaatgttaacgcaataatatttctttcaattaattattttttaaaattctcaactattgagattcaaatataaaaaaatgcaaggtgatttcaaatattaaatttgttcacacatatatgctgtgaacaaaataaagtaaatggatttgatatatatatatattataataataataataataataataataataataataataataataaaggaattaaattttttataagaaccaaatgaattaatatttaactgaatgtatgatttcatcactatcattttcatcaaacattttaatttataaatcacactatttttatgaaatttaatccctatattattattcatttcaatgactttttttgttcagattcaaagtaaatttctataactttaattttaaatgagtaataattaaactagcttgtcaaataattttaaacaatatctatgtataaacatatttttaaattgtgttatcaaataatataataaaatatcacctaataattttttttatgattttataatcaaaattaagagttcaaatgaaccctatggaagttggcagccataggcacggccatcgggcctttgatgtgtcacaattactaaacaagttggcttgccatagccacagtcgtgtttttttttttcctagcatacaattactgaacaagtatttattacatttactaataaattgagttcttacataataaaacgtctatatgcaaaggagggaatcattttgaatttgatacatgcgtttggaaaatcttagcagttactatatgatgctcactcacatcacgttttaggtaaagttttcgaacaatcacttcggtttcctcgggagctacttgacggtttggcaaagctttgctgtgaagctcacgtttttggtcaagaaccttcacatgaagacagttttcgaacaacaaccatttcagttcgatgaatttgttacatcggtttccacaaagatgctcattcattctcatgcatgtcggattttaggtttaaaagctctctacatgccggtttcccggaaaactttgatggttgggcaaatgaaacttaccaatgatgctcacgttttaaggcaaagagcctcacatatagacaaatcctcagtggcatcatacgttatatacgtgaaccccacaaaaactatgttttactataagtaacgttttagttcaagagcttcacatagagacaatagttagtggaatcttatctgtgcactcccacaaaaactgtgtgctacttcaagtaacgtttagttttagtctcacaaaaactgtgttttactataatttggtggtccacagtgtgtgttaggattaaaactgccttgaaactgatcacgaattgggtgaaagctagcctaagcctggtatggcttatttatttcaagctaaagatgaaatttactgaaccattttaattttactgagtcctccaaatggaaatcgatcttctcgttggctagggattaattagtttcttaaaaactcacgcgttcaaattgattttttttaaagaagagttaaacaagcagtaaaaaatacaagacttaattggacaagtttttttaatacaaaattttgtttttattaacaaaactcaaataatgaaaaataattagtactattaaagcacaccagatttaggcacacgaatataaaaacagacaagttattcttttttatcatatttattagcacccctatatatgaacctgaaatacttcattttccacacacacacactcacaaaaaataaaatgaaatacttgttcgaaagttgtcctgtttatctttagtaattgtatatatattaatatgctagaaacagttttggtaattgtatatactagggtgcagaatctttgtagcctattattataaattatgtttatttattgtgaggtcgaaatttgttattaaattacttggtttagaaaattaaaaatattaactatagtttatttttattacatgaaataaaagaacgttactaaattgagtatatgatgtagttaaataaatttaatatcttaaatattgataatttatattctttcaatttaatttagatttcagttttttttaaaataatttggagttaagcttttaaatacttaattacaacaatattttaattgaatacattttgaattatttattaaatactttttaacatatattgacattgtaaaattctgtttaaatttttttatcttctaaaaactattattaaaaaataatataaaagtttttaagaattttatctgtagtaactgatacttaaatttgtttaactaatattttgtttagtcctaattaatccttaaactttaccctatttgcaaatatatggtcgactttattttcatttcagttgatccttaaacttttttaacgtttatgcaaatagaaacccttaaactttaattgcattctaattaattgttaaaatttatcctttttacagatagttatttctatcatagtggagttaaattatttatcttaaatgtcaatcattgattaatatttttcttcttttgtgatactgcatgttcattttactatattaatatataataaaaaaaaggaatttagaaagaaaaaaattaaacaacctttattttatttttcaattctatattttattatattctgctatttggaaaatgatttataaacatataattagtaaatgattgggatttaaaataaataaatggtttggatttcttctttgttactagtttaaccccaaattaatataagactatttacaaaagagaaaattttaagatgaaattcaaattaaagtgtttgtgtgcaaaaaggataaagtttaagaataaattggaacgaaattagagcttatggaatctattttcaaaaagataaaatttaaggatcaaggtagaataaattaaattaaagttttaggttgtctatttacaaaataggtaaagtttaaggtaggtaaatactttttcctcgtagtctcaagatttttgactattactatgaagatatcttaattttttttaaaaaaaaattaagtaatttttaagccaaaaaaaaaagttggcccaaactaataaacaattgttactaagccaatattgctaaatttggacatatatttcttatggaaggaataattttgtttgaaacctacaaggatatcaacaacaaggatcaacaattatagttaaaaaaccacacgacagggtggagttgatcaacaaatgtataaaaaaggcaactgggtctcatattctcaaatatcatatagagataagttgttagaaaattagcaagagcctctattgtgagacaaggagaatttcatcattcaaaatcttgtgacaatcgaacacgaatttggaattgggtattacaaaagatatacttgggtgagagttgcataaaagctatgtagtaaaaatatacttcaacaatgtcataatttatacgaatatacaacatcgattaaattacttgttgcacgacaccaaggagtaaggtggagacgatgaaattctgatagagaatgatgatgcaaaatttaggatgtgcacaaagatgcaaatacaataggtgggaaacccatattatctaattttgactagttttaatttattagacttatttaaatgaaaattagtaacatccaacactcaaataaccaatgaaggttgggtctaacgaaagaaaatagtgtcaaacatagtggtgaaccaatgttagtgtccacattagaaaaaatattcatattttgtatctgatcatatctcgaacatgattatcttgattatttttcattacattagcttttaagataatataataatatatacatcttatcaatagaatacatatttaccataaatatgagttttttccatacagcggacttaagaatcaatcctctaactagtgtggaaataaattctaccattcccatgtcttaaaaaataaaatgtaattaattagtattactataatataagatatagagtgaaaggagtaaaaacgtgattctggttgttctcttgtcagttacttttataattacattacaaatggatctaaataagattttccctttataaatagaccttcaagggttagggctcttcacacccattacacaataagctgtactcactctctatctctctctcttgctatttgtctatttgtgatttctttgtaactcaggctacaattttgattctccactaacaatcttgactttgtaggtagagaagttgaagaaggagagcatacaatgaggagagttttcttgcgcagcgatggaagtgctagatgttcgaacaactcgtctgtgacgattgtgaggcacgtgagatatcgcgagtgctgcaggaatcttgcatatagaattggaggaattgttgtggatggctgcagggagttcgtggccagtggcgccgaagggaccggcggagctatgagttgtgctacatgtggatgccatagaaacttccataggaaggaagagcaaactcaagtggtttgtacctgctcttctcaccctactaccagtactggttgactatgaagactttcgatcatgtgttctatgtgtttgctgaacaattcttcttcatcatatctaaatctatcctatgttatatgttttctgtggatctagctttaatttgcttgtttagtttaactttatggttttttattttcgcttaatgatatgatgtaatggactggtgatgttcttcaaatctagtgtgatacgtatgaaatttatgagtttgaaaagatgtttttcatgtcatctaagtaactcttttgtggtcttgtatacaagtttttcccttttcgatctttcattaaaattcactttgtctaaaattttgtcaaaatcattactttttaacctctaaaaaaatgccacttataaactaaatcgatcaaaataattatcaaatacaatgaaatcgaaatcagaacacacaacaatagaagaaaattctcgcaaggtctttccaaaaaaaaaagcattgataataataaatattaaaaaaatgattgagtgttaaattgtatgaggaatgttcaaataaaaatatcgttaataccttaattcaatatgttgtaactttgagtcaaaatatatgttaatgttatcaattaatttgaatcaaaatatatattagttataattagcttaattaaattaaatatttaataaaattgaatgattgaatgtttaaatcatgaatattgttaattaccttagtttaaatatatatgttgtaactttgaataaaaacatacattagcgttattgattaacctaaaaactaaaaatattcaaggtaagatgaacatgtgattgttggtttgaatgaagtaaaactctaattttttaaacaagatttcatgttcaagttccaaaacaatgtaattagaagaatagatttcacttgaagatgattatataaaaaatttcaatagaaaatcataaatcaactaccattttatataaagttaaaatcttataatttaattatttgattcaataaatcttacatttatccgatgaatgttgaaaacttaatttatctttacattaaatatatttgattttttaaccttttaaaaatttgtacatcaacaaaaaatagatgaagtaattgtaaaattaataaatggtaatttttttaccatttagcaaactgtgtggatccaaatgaaatttatttaaattctttaaaaatattcattagtttgatcttgaaattcgtgtatgtgaaaaaaaaatatcactaaagattttttaatcaaccaaggtatttctgaccataggtaaaaactaatttcttgaaatattaatatctatttaaaaggttaactttctctatatttttctttctttcatacaagcgaacttaagaatcaatcctctaactggtctggctttaatgaaaaacataagaaaaatataaaattctagcgcgcatttccatgtccaaagaaataaaatattacattgaatggttctgagatgttcttttgtcatttacttacaattcaaaattggcacagctcggacttagtcaatttcaatataccttctagggttagggctcttcatacccattacacaataaactgtactctctcactgcctttctctcttaatcatctctctgtttatttatgatttctctgtaactcaggctacaattttgattatccactaacaattaattttgacaacaactttgcagggtttggaggatagcataccatgagaaggatggttctcatgggaagaaatgggcctcaaagatgccaaaacaacgcattagtgacaattgtgaggcatgtgagatatcgcgagtgctaaaggaatcatgtgtgcatcttgaaggacatgctgtggatggctgcaaagaccacagagttcataccaagcggatccgaaggcactgatgcagctctgatttgtgctgcatgtggctgccacaggagttttcacagaagggaagaacataattcatttgtggatgctcttctcatccttctaccagtaaagcttgaagactataatatgcattttctatggacctgcttctatttccttgttttgttgttatggttttggattttagtttaattaatgatgatgtgatggacaggtattctggcaatctggcaatctagtgtgatatatggtttcatgaatgatgtttgagaaaagcaaagttaataagatgttttaatttggtgatccgaagtgcaaagacgatgaatgataatttattgttctcttcatatataccctatatattaattaaaacaatattttgggtatatctctccctccccattttttcttttttcttttttctatttttctttctatttctatttataaataattataagttattttttgaatttactaattggctacaaattaaatgatttccagtaaaaacatgattaggaagttgttctggttaattagctttttatcatttctatgtcttttttggatgcttattttgaatttactctgaatcgattgagtatgtccaatagaagatttcattttgagacctttgacattttttttttgtagattttaatgtatcacatcattctcaagatctcttttattttttaatctaatagtatatcttattttaagatcttgaactattttttgtagaacatatttttattctaatagtagatcttattttgagatcttgactgcaaatttctcttaagtaaaaggaaaattctatagaacagttgtaagattggtatatggagtagaatgttgggaaatacataggcaacatgagcataaaataggggtagcggaaatgaggatgtgtgaatatatgaaggtggataagataagaaatgaggatattcgacaaaaggtatcagtgatatcggtatgtgaaaagatgaaggagcatagattgaggtggtttaggcacgttatgaaatgaccactggatgctcctgtaagaataaaagtttattaccaagagctcgacacaaagagaggtagaggtcgaccgaaacttatataggaaaaggtagttaaacaagacctaatgaaatgagatatagattgacggacggtatgtcttaggacggagtggagaaaaactataaatttggtagagggtttactcattagtagttctatgttccagtcgttcccttgttttagttcttttcctcttttttttttcccttcttcctttcacccttctttcattttagcttattttttctctcttttgtcttattttcacttttctcttcccctctctttctctttctttgtctcatttgtgatttatcattaagtttatctaccactaatcctaattaatttgggttaaatatactgttaatgttgatgatgttaaatcattttttgtagatactacaagaattagatgcaaattaaccttgtggaaagagagggtaaaaaattatctttttaaaatgaatgcagatcttaatagttattttacaaaaagtagatcttcacacataaatccaacatcttactccaataataaatcttattcatcttaatcttaatatctgcttaaaagatttgttattcaaaatgctatgctttcaaattatactaatctacacttgcattgctttcccgatctatgcttattttctttttcctagttttctataaacacccttgaatcttaatttgtaccattaggacgaggttgttcagtaattcattaagacttttagatttacatatgttttttttttctttctctgaaatatgttggattttgattatagtctttaataaaaaacttcttgactttaattagtctcaaaataaataactaaatattatagatgtaaattctaaaattaattaattataaatatcacaatagttaatatttttaatactataattttaattttaaaataatcatttaattttttgaaaattaaaatattcttaatttttagtaatgtttgagtccgttaaaaatgattgccaatgaagtatatgaaaaagtgagttgtacaaaaaccattactctgtttttaataatcacaccatctcaattagttttttaattaaatataaattctctaatttagttttttaaatttaatttattatagttctttaaaaataaaaactctacatgtcattggtttgaggctaggatctcttaagtatcaacttcgagccttgacttgaaaaaaatatgattaggagggcatatttattaaaactggtaagttggattcttcaattaaaaattaatcattaataaaattgatgaatatttcacaataaagttaactgttattatggcttaactatgttttttttgtttctattagcattttttcatttttgaacactaagtttagttttctaattttagtatacttgttagttgaagttttttttcaattttagtcccaataggatattttactcatttttagtttctaattgtgttttattaaaatttttcatttataatccttataagtccacacttgtaacaacaaaaattaaaaagacgcaaacttataggtattattattagaaaaatggactttcaagataaaaaaattgtaaaaacactaaacttacataaaaacatatttaaacccaattaatattgttctatttttatgaacatgaatgtctagcaggattgctagtacattgatgttggatcaaaagttctctctaaggtatttatgggagaaatacctctagaaatattgatcactatgcactttaataccaaccaaatggaggtgagatgtgtgcacaatgctaataaaaaagtagagtagagagaacatgtacctttttccatggatgtaacccttatttatatgtaagttacctccagatcagttgatagtgctaatgaaaaagtagagtagagagaacgtgtacctttttccgtgaatgtaacccttatttatatgtaacttacctctagatcagctgatgcttctttccgatttgctcggctgaaatctataactgttgaagtcacgatatgtgtttgttgtgatcctcttcactggttgttacgtgcatagtttaggtctccttgattgttattaagattctgaaacaataggcttttattagacctcatcatattattaggcccgtatgctaagttggtaacaaatactaacccattaaaaccaatcaatcactattaaaaagtgttatatgcatgaaaggacgactcactgagatcagaagaaatttacagaagtgttctatgaaaattttcttttgctgatacttacaaaattgagctacaacattgaaatccttttgtctatgaaaataatcagtaattaagtttctggttacagtatatatgtatgtatctctttggtcacgacgacttgggcatttgttgttgctgcacaactagaattgaagcattagtattggtatcagaggaagccagcaaatctccaatcacacctaactcaaaaaactctgtccaactttcaagtgctgctgtctgtggcgatttgatcccattacgtctcccaactatgaaaaaatcatgacgatttgcaatatccgacacaaaagcagtggtctcggaaggttgatcaatggaaaccttttcgtatgacacattctcaatagtaccataatagcccttaacactcttcaacacctcatcatcgagcatgaggttccaatttgcctcactttggctagaaactaagtggtacacaaccaagttacaatcacaatctttgatggtcctcttagccaagcacagtgcctctctatcatctgcaccccccaaaaagatcattgctatttgcttcattaaagggctgtgatgagtagaagaagaagagcttcggttcacgagaatccccacggagcatggtgctctttcaaggaccttagagttgagagttctcatgttttcatcagttgattcaacagcaccatcctcaccccatcttatgtgaaatggaagtaagatgatggaagagagtttgtccaatgcaaggtaacaaatatcatcatgcatgaaacgtagtggagatatggctgtgtaggtgctaactgatgcagtgccagcattgtcatgttcaaagaggtcgaatgttacaatgatatcttcagagtagttgtggcctgagctaagcctttcttggagacggtgtgagatgaagatgggagaggatctaccaactaactccatcagatgcaagacgtgaaccactaaggggttcgctgttgtggggcaacaaatgtcaagaacattttttacggaatttatgtggcttggtttgtggatgcatgcaacaacccgaagctctgaattgggtttcaagttcagtatgttccttttctgataccctgcgtatttccttgctgggtcgtataaggatttcaccccaatgcgtgcaatgcttcccaacaccaacactgatatagccatcatggagattgtttcgttgctcattaactgcattgcattagaactaaaattagataacttttatagctggttaaatatgttttgtttacctatttttagtcatatatattagtcctaagaaagaaaaatttacttgttcaattcaagagtacatggtcttggccaatttccacataatacatatagtaatttgaaaatgtgttatgtgaagattcatcgagatcaaaacaatcggcatcacctgatcattggttaatttaatgagtattaattattgtataatgattgtacaaatatttaacatgcgtgcagttttttaaaattaaggaaaatagttgaaaataaaaagagagtgaagtgagtttacgtacaaatgaatcaaagagaaagacgtcgttgacaaaatcgacgacacctttgcagctcaacaagagagcgaggcagaaaccatccgttttgggcatgttgcaatagcggcaaatcccaacagttataagcatcttaaccaaatgcacaacaacaacagtggtaaccacaacgagaaccaactgggaactaataggcgtggaaacatcgaccttcatggcacaacacgtgacaaagattggaacaaggaaccatgagttgaacatctcaagctgcttcaccaattcagagcccaatggagggccttctggcacaagaagaccaacgagtaaaatcccacctaacactgtctggttagcccaaactccaaacaaccctacgaatatggtcatgagaatcaccattgatgtgtatgttttcttcacaggtcttccttctggggtagtcctcacaatccacctcattgcggggcgtgcaatcacaatcgtaagtgtcatgaaaacaacatattttatggatgtgacgagtgcaagttcaggtccctttccttcacctttatcgtgagaatcgagtttaaggctactcacaacagcagcgccaaatcccctcataacttcggttatcacatccatggaaagtgctgatgagagtgctaagcgtccaagttcagagttcaatatctcaagatcagagaggagagaagctaccacagggaaggaacaaccactgtgccctattactatcaccggaagttttcctccatcgaactctcctagggcttgttgcaagtaccccatgaaactgtagcataccaagagaccaatgaaagtgggaatcataagggacgaaagagagattgtccaagctttcttcccagtttttgttatcatgctgaaatccatcgtcaccccatttaggaacaggaagaataagtacccaatccctgttactaggttcaatacgtcttcactcccgtaagggaacaatatcactttgaatttggtcaatgcttctatcttcagagaagggcctagaacaaacccagcctgcatatgcaccaattcatttggaaattaatttacatatatattgcatacttggttacaaataattttatttcggtaaacacgtaaaatgaattgaagtttcatctcaggaatctatggaattaaataaatatttatcttaaaattgttatatatgctaccccaacgtttatctaatttatttattcctaagtttaatcctatatctatatggaaattgtttcatggacatctattgtactgtgagacagataaaaaaatatagatataatagaatttatgatgttttagaaagaaataaatataaagaaatgagaggtgttgatggagtgtttaaaataaatgagtgtttattactctattcatatatatataatatggattgatattatatggttttccttaagaacatatataacaatgtcatgcatgcatgcctatgctattagataatagtgtttttctgtgtaattaacatgatgtgcaatatgtcatgttcttgtatgagacctgcatgcagtaacaaagattggagaagggacaaagcatatatatatatatatatatatatatatgtatgtatgtatgtatgtatgtatgtaccatcatttgtgaaacgaaataagggaagccaaggcgcctaagcacaaaatgaaagcattgcgtgataacgaaaatggtgagaatttgaagctccaacaccggtattgtggatcttgaaagtaaagcgccataatttgggttaccccatatgccatcggatactatcttggatggcatgtcaatggaaatattatagtaaataaattttctgtctgggtctgaattatagttgtcgaacgtagcattactgaaaattgttctgcttatgctcaatagggtctcgtttgtccccatgatggatgttattgatcaagatacagtagctagctcgaatgcaatgaatgataatagttattagcaaatcagaatcacaaatgaagctattgacacaaagtctttttatatattgctcctttgtggtggctagcaacatttggtgtgagttgtgacagactaatttcttagcatcataatattggaacattgtcataacaaatcataactaataacggttttttcatagcttgtttcatctgtaatcgaaacaagaaatattaaaacaactatacaataattgtaagttaaactgccatgtcaaacctaaacccgaaggttgtggttataccgttgatctaaatcatcttctcgttaatgttatttacattcacggaatggattaatagggactttttcattaatttgaatagtactactaccagaccattttttttcaaacttcaactttcttttattagggcacttaatataggggaaaacactaattagttttctttctatgttgtatatactatttaataattatataacacaattgataataattataattaaaaaaatatataattaatgttaattcacctgtaacttgtaaatatgcgaatctttttctttaaaatacccaaatcttctcaccactatatcagtgacaattaacacttaagtaaatgaaaatgcatgctttatttactattttttagataagcatgctttatttattttatttctaaataatcacaaagctaccactagttttgtagtgaaaaaggtgaatataaatggcataagaatagtaagaattaacaacaattggtcgcatgaaaggtgtgaaatataattgaaaattgaagcatcagtcaaatgcatgctttaatatttttcttggtcttatgcatgaatcaaatgcacgttttggaaacgaatataggaatttaatatcagcaattcacgaaaaataaattcaccattttctttgtataaatagccagccagctctagctttcagtcatatcctagctaatagtaacttgaaaccttttttaagctttattgtgcattatatctctactattgtgataagtttgaatcatggataggaaagctagtggtgaagttagcaaaggtgaagtccccaaacccacagagaatgttggaagtggttctgaagataaggttatgaaggctccaggtggagatggatcttatatttcgaggaaggaatttgagaaaaatcctcagggttactttgatggtctgcatgctgaacacaagggcaataagtagttgcgtgagatttttgtttcttggtgaatatggttgctatatgtagactggtcctataataagtaataaatcttatctatgttgcccgcaacaagaaataaaataaagcagtctacttagttattctatgaatttctatatatctctgtactaattctatcttttaaacttttgtggtgaatgctattattactaggtggtgttaactctggagagggtgagcactgagcaacaccccttttgaaccccgttttaatatgcaaaagttttgttaacaacgctcttggaaagatgttagattgaataattcactcattaatgagcttagcttcttaaaaaattaaagaaaaaaatagttgaaccgaaatattctgatatcaccaatgtagcacacaaatataaataaatttgaattaaaatctttaggtgcaagatgtataattgatgaacatgttaagcatcttgttagatgattttgacccttggtttatgagggaacaactattattgtttttaaattggaagttttgtgtttaagtattcgcttaggggttcaatattccttaataaacattacatttccattctcctcttcctctccttcatccttccagcggcaaaacaaacactacaaaagattagttaataatataattatatttacctttttcattaaaactgatttttgttttttattcattaaatttaataatattatattaatgaagcatttgtaaactacttgataagaaattagcttcgagatgtgcaataaaattaacgattaattaaatttttagtccctgaaggtttttagcttccaatttttagcccttaattttttttttgataaattttagtcttccattaattttttgtcatcacttttaatccttgtaaattttttattcatttgtaatccctcatttatttttattacgtaaaattagtctctaatataaaataaatgagggactaaaaataaacaaggaacttaaaataagaaaaaaataaaattagagggattaaaaatttccaaaaaaatttgaaggactgaaaattaaaatctgaaaaaattgagactaaaaacttatcactcctaaaatagaaaagaaaccttaattattctcgcactcaattttccacgctttgtagttcacatcagtttaaataagagataattccaaaaattattgacactatttttttttttttaatcgtagggaaaagatagtcttgtgtcacaaacagtagatacttgaggcttctttttttctttgacaaaggaatttttttcttctagtttttctcttttgttataatcgcatgcacaacaaacaatattttacattactgatatgtgcgtgtagttgtatctgcctcttaattaatatcggtccctttaaatttatttttcatttcatgtcgggataagaaaatcaaaaagtaaatatttgaaagtaatttaaataaattgtcgagaaacgtatggtatcgattgtagttagaaattaaagcagttttcttttaatttatttcttaattgctttaagcttgtatggaaagatacagtcacgcacgtgatttgatcagaagactgtgaaaagacatggacaagatacgggcaagcatcatattcaattgttgtccaactctaaacacaatttgttgcatacacttatagctccacaaaaggcacaaaaaatacgttataaataatctaatgaggttacttgtaggttaattttttttttgttttttttataatatacatgttattttaaattttagatactttttttaaaatttaattaaaaataatgatatttaaatgtttttgtttttatttaatttttaaaataatcaattatctttatatgtttttgttgtaaagaaaaaaactttattttttaatacaaatattttatttcctttttttataaattttattgtgaagatattacatttttcttttttttaataaaaatatttgagtatcatttaataattttttcttttgtaatcctttatttctattctaaaatttgcaagttattacatttgtgattaaatgattatcaattgataacttgaattatgaaacaagcaaacattctttcttctatcgttaattttcatattaaatttttaacattttttgttcttatgtaatattttgttaacagtttttagtctccactatatcaaataacaatataactgatgaactgataaccacatgacctaacattattaatattttgtataaaagtaatactaatatataactttgtctgatgaattttaatcatccccccccgcccaaaaaaaaaaaacaaatgttcaattctgccttccctgagttgtgacggaaaaggattgaacaccaatcaaaaaataaccagagacttgcactagtagccaaaaacggagatgagaatgttatctagagtacttactttcataagcaagaagatcaacatcaacattacctttaatcctaagttacttttgcgagcaaatgaagatatattatcccttcataaatcatttgtattcaattgataaaattgtcaaaagttatcataatatgatgataaaatgtaaccatgtacgaagaatatatgtatacattcgcgacaaaattggatttcaaagtagcaagagaaacatcattgaaaagaattaagaatagtaagctaaaatatgctactggcggttccgacttggaagcaagcagtcaaatgtaaccatgtgtgatatcacagattccttgtgtgcagtttgtagtctaggcttggccaaatctattatatcctcacgcaaactgttcataattacactgatttagcaatctcaacattcaaaaaaatcacattcttttcatgtgcttaaacagtaagaggatataaatatgagcctgttaaacagaaagtaactagacaattgtagctgagaattgagagagaagagtgcaactaaccgttcccactctccggtagcttctgcgtgccacttgacagactgatacaggcgatccaggctatagagtgccaatccaaacatatattgtgcatctctctcctgtagataacatgtaacatgacatttctatccttggtctatccatctcattcaaatcaactaaataaaatcaacaaaaaggaaagctacttaccaacccttgatcaacataattttggtactgcataatccttttcttaacctctataacaagtagcctcctctgaatccgagcaactctacctcttccctcagctttggtatcctaatttacacagatttttttttttttttttatcaatgtaagtaatggtaatgatacaagttgacaaaaaaaagaaacaatttaccgtggtaaaactccaattctaattggagaatatcacaaacaccacctaaggaattatatctaagttctgtccatgctaaatccaagccaacttactttagaaaatcattggaaattatctcactaaactataatgagtaaccaaatccattgaaaacagaataggtaacttcataacactgtagcatccaccaatcaatacgaggcaaataacaaaattctatacaaaaaaaaatgataacagtcaagtataacattagtggacaaagaaataaaggatgaaattgagcagatttggtatcaaaaaacatctttttacctaacaaataatagttaagacataagtaactagaaacaggtgatgtaatatctagtccactatcacatataaacaaattttaacagtatccctacacatacactaaaaattagtcaggagtgaagagattaagatttagcaatatatacatactgtaacttgcaagcatatccccgccccccccaccccctctcttttctttcccaacaatcttgtcaccaatattcacttaatcacttcatggagtagggtgtcactccaaacaagattcacactccaactcagttgatatagtttttctcaagagttcaatactatagtatgatatttggagtactatcttctttaagctcatcattttgtgccaaccaaccaagggaaattacctgtttgaaccatccacgcactaacatcataagtaaaagagagaggaaaaatgccggtaaagcagtcagaactgcaaagttgatttcatttgcccgtagaatctggttcagctctagcattgccctgaccaaaatattatcttgaggaattaaaacaatgtgaaatatttacttaaattttcagattaaaaaaactcacgtctcagtgtctagcttgagcttctgaacctggaacagtgaaaagttacgttaaaactactaaaccagatgttacatataagatataacatatgaattacattacctgaataagtatagcccgaaccagctctccattgagaaggttttgaataggatgcatgagttccttctcatacctgcatttatacttgaaaaaattagatcttaacaattgtgataaacactaaaattacaagaaatgaagtgatattatgaattttactaataaagattctaaattcaataattcttgatattagaaaatgataagcccctaagcacttggggaaccgtctttaaaagctagctgtcaaggagggagaaccaagccacatgtgtactacaccaaacatcccatactactcaatgtgagacttaggcaccacataatacccaagtccttatcttagcactgccctcgagagccgaagtcctcgtagatagcccttctcgagttgacagccagctttaataccaattggtaagcacccaagcacttggagaaccctcttacagtggggggtggaggccaagtcacttaaagtactccaccaagcatccatactactcaatgtgggacataggcaccccataatacccaagtccctatcagataatatagagaggactaatatatataaaaaacactttctgtatgttattgtccttttgttccatcaaaatccaatttttaattctgcaaagttttgaatattgtcaatcaatgtaaattgaaaatattttatatgaatatccaggtaaggaatttagattgttctaacatggacatccaatatcagaaggcaacttaaaaaatgaacaacccattatcttaaaattatttgactataaatgctcacatatttccaaccccaaaagataccgctagttaaactagaatagttaacccacaacataggccagaaaccccttagtcaaaagatacagcagtacactcatttaatgtcaatatcaaaccaatggctttctattaaaaataacacatcttcatgatgaaacatcaaagcgagaagaatagctagaaattctatagagcagtgtcttcattccccagaagtcattggcattgagaactattttagtactaaatccagaaaacaaccaagctattaccaacatataatgaaccctacaggtataatatgaaggaaaatggctcacaagcaaatccatgtatctatttcaaattcaattccataagtaccttactaccataagacaagtataactagagatggttctaaagtgaaatatccaaactcacctatccatgactatctccatcatttcctgatctgaagctttcactgggaacttctgaccctttgtctgctcactgaaagccaacaacattctgtacagaaatttttagaaaaagttacaatgaaagcaatatccaattatccatgcaacaagcatgcctttcaatttcaagtagatgagtattgtcaatcaagcttaaagcaatatccatgaatatgagtaaatgcaattacaggtagtcataaaaaaaatgaaataattcatagtatgaagactagatatctctaatatatccttactgctaactgctaagcatattttatcttgttgctaataaatccaaattcttcagacagatttaggtggtactggattgtacttctacttatggtattagcatatgctagaaaacattgtaaaagataatagtaggtaaccagactacactgaatcaacaggattagaaaaattaacatcctgcatttaccgcacagcttctattagttgattttttttcctatttcttttcaaattagatcttctacatacagaatcagcttcaattcaagccatggaagagagtcaacacaactcactaaaattttcaagtcccaaaagtttcacaagcaattattaaggtgcctaattaacagcatatattgcaaaactgtaaatagttatgttaaattaaacattttgtaatgataaaaaaaaattaaacattctgagcattaaggttcatacaggtttagtattcaaaaataaaaaaaggcggacaacgtatttaaaaaccaataacctgtgtagtgagttggaagttaactgcacctcttcaacgtccataataccttgatgtctcttcttgaatgtatcaaaaagttcatccctaatggacaaaatctgaaaaatgattgcatcagaatacatacaaaagtacaattatgacgcaggacaaagtgacaagcaagaggactcatatctcaatagtacataagatttttatgtaatttttatagagattactttaaagggttttatttggtttcaactgatggatttaacccagtcaaacgagtactagtgggatattgaatagaatagaataatttaagggctaggcttaattttaaaacaacaaacaacactcttcctagctttataatacattctaagaactttccttttttttctgggggaatccaaccttatatacatattacatagaggcatagtgcactttagatcagcttctagacaatattaaaccttatttcatgcttccatcctacatcaatttgtaaaccttaatcagtttggttcactttcaacagatttaaaaatgggaatgaagagggagaagatagaagaaaatgaaatttcttcattgctcatggagaacagacttttacgaagggtacatagttaattctaattattatagatcgagatttaagggaaatgaggttaagaaaattgaataatgctgatcacacctatctcataaggatatgttaagttaatttctcctatattaaggagggggaaaaaaaaaaagaaaaaagagtgaaaccatagtaaattatcaagaagaaatgtaccggttcctctacatgattcttaaaaaagctatatgttgagttcctagcttcctcaacccaattatcaagatcagaactccccaccaatctactatgccgcaagagccaaatggagcatactgacaaaccaactgcaccacatgtatagcggatccaatattgagttattttccttggctttttatgtttgatgacctgaaacatattacaaccataaaattgaaatttaaaattttaatgatattacttaacaaaccaatcaacataagctggagtgctggacaactagaaacaaatatgtattattaaaacaagttgattaattgttcaatttcagaacctccatccacaaatgactaaatccaatatatatggtcaaaaaatagaagcccaagttattgactccagtcaagataattttgtccacttctaataggcattgacaaagtcccagagattggcaggagatagagacagtgacagtgaaaataacataatatagaagctatatcatgaatattagaccatatgatataggtaaaaatttagacagtgacagtctccaaaacttaatcaaataacataatatagaagctcttacaagaaaagatatgtatgaatccaacttgtctaaattttgataaactgaattgatagcatctcttatttcacagtctgtccactgagaccccgcctgatttatttctggcaacttctcaaacagcagaggggttgaatagctcccatcaacagaagaatcactctgaataaatagaaaaggtcaattctagaaacaatattaagctgcaaacatgcttcagttttgctttacaaaccatggtacatagagataaggggtaagagtatacataagggaaaacagaggcaaaaacaaacaactttatttatataaacctgacgcattgcatgtagatgtccaattgaagcttctaatgttgaaaacaaaacattaattgtaaccaacaacaagggcagcttagtctctggatctttcactaactcctctccaattttatcaacttccatataaacctgagtatgaagtttcaaatttgaaataatatcagaaaattgatgtcatattggcacttaagaaagttaagttgaatagaaagtcttgcatatttataattttctatgtctacaggtgagttcataagtgtacattacatctgttcaccatgaatatttgtctacacttacagaatcatatgatatgccagaagaacttgaaccccacatctacatgtaaataacttagcttaaattctatgctgactgaactatcctgtcaaacctatcctcataatccctctgaaggcccatacaaggaattcccctaaagacatcaataatggtgccacagcaagaaaaaaaaatgggaaagtacacaagagaaaaactaggtcaactgggtgaaaagcagcagctgctaagaaaacatgcaagatacaacaccaccttcataatcatttggtcattccaaattttttctcttctacaaatatgaagattaataacatcaatgtgacggaatcatacaattcaaaggattattaactattgagtaagcttgacaacaacagacaagcaaattatattcattctaattatgaaagactagtcgtgattcaaacacaaggaaaaagccaacttgaacacagcatacctgagccaaaaatgtggcgagtgaatatcttaagctactcaaaaagcctactctctcgccaatataatcagatgcagattggctcagattctgtgtggacgaaccctgagcaatgagtccacacaacaacttaactgtttcatcaataaaagcctttggacccctctcaaatatcatgaaacgtgccttctcggaatccgacctctgaatgataaacaaataagcagtatgactatttcccgaacagacacagtgtgaactacctgtttggataattttttccataaatacttataagagaagaaaataagaagtaaaaacgaaacaagtttctccatgagcaaaaattagcttctgcataagctaatttataaaacttttctcatatattagcttctccaagaagcttatttttaactaacgcataagctcatttccatttttcttcttattttctttcttttcagtgcttatagagaagtttatccaaacaaagtcatatatacagataacaaaagcaaaaacagaaccttagctctggactgccaaaagtgcagattcttttggacgccgtgcaaatttatcaaaacacgctctaatatatcctccacaacataatgcactctagatctcttgatcatgagcctacaagggaacacagcacaaaaaccctaatattcatccatgcgttcgttcaatgtagcaaaagaaacagagcttagaatcataaaatcacaaatgatattcaaacacgaacatttgtttattttatttatcgttgaatttgaggaagtgaaaaaggagaatgaacttacacgggagagtcgagtgaagaggaaggtagtggaagagggagacattcccgacgctgcgttgatctgaagcggagagcgaagttggagaagtagggatagagagcctggattcggttttcgagatagtgagagtaaaactgtgaaaggagtgttctgttctctacggattcggtttccgatggtggaaccgccatgagaaacgctgctccaagcttcgcgctgccaagagtcagagagactttttgaatgccgattgatcgagttctttctaggtttttttatttttattttttaattgttttattttagttcttttattatttttcatgactatgtgaccattagcataataaccataaacatatttaagattaattttcagttttttctttgcaaagaaaaaaaatgttggttattattatttgaatttataatatttagtatttaaaaattaataaaaaattaaaatatgttcagattttttgtctttgattttttttttttgtaattttttagaataattgttagaatatacaccatcaaatacagaatttaggtcaaatacataatttagttcttatgtgccgtaatctcaatttagtctctatataaatttcgtttaataaatcaatctttatattgcaagtattattagtttgctcatctccgtcaaatgtattattaaatttaagaaattaaaaatatatttgaatttaatccatttttatgtataaaaatcacattgaaattccacaattcgtataagactaaattatatatttaattataaagttttcttatactacatataatgaagaattaaactcttttcaaattaaaacctaattatctaattcaagacttatggcatttacatggattgtttgttgtcacataaccaccctcttcgcttaatcccactccaactcctttgccctccctctcatccctccacccccattgttttttctctctcttaagattcgttcgtttgaaaagaaaagaaaaagacagtgaaaaggaaaataaataaacaatgagatgagaaagaaagtgaaaagaaaaagaaataaacaatgagatgggatacacacttatatgttttaattcaaaattttcatcttaatttactttcattttattcttttcactctactaaaggaactcttaaatactaaagacgatttctcacaaattcactatcatatagaataaagatgtcctcagccttatatttccataaagcaacatgacttaaatcatagcatcattgtaggaaaatgaaactagtttggtcgtcaaaagtattaaggcaacatctaaagcatacttagagactagaacttgtaagcatctaaagagctgtgtcattcacctcaccttaaatagtatacatggtgtattgcaatttctttgctccttttcatgttatgcagtgcccgaatcactgattcagtcttcaagggtgaataaactcccatcatcctatgcctactcacgttaatttttacatagttgttagtttgaatttttatgtttgatagtgactcgaataaggaattgtaatttattaaataattatcaattagtaataacttgttcatgttcattataaaagcaacgaaaatttttgctgcgttcatttaaaataatgaatgactatcaattagtaattacttttaagttaattgggatcttaggaatacctgaacccaccgatcaatccaactcaactattatcataatcagttaattcaattcgaatttgtaggatgcacccctatgtttttctcttcactttctagtggacacaagtcactgtgtcacacaattaatagagaaagattatttacacgtaagcggaaaccattgcattctacagcaatattttggggttagtgttataacacaacacggataaaattgctagagcctagagagaatccaatcaagtcccacattccaaattagactaaccattgttggcctttataagtcccacattggttagaatattaggcaaccaagcctttatatatcttctgacaagcacttcagcatgccgagctgcgtagcgtcagcttgtgatccaagtgggggcgtcaaggtggtgggacaaggctctggcttagccaggttgggttggtggctgcattatgctggcctgcccgctccaagttgagagttgagctatgggacttgagcgaaggcacaggtctcctggttcctagacaagggggcaccgcgtgaggctggtttcacagagcagcgatcacccctccctcttgacagtggagggattacaggctgctgctcttccagtccatatagcctgatgagcctagctcttgaaccatcattttttattttttttaccttaccaagttttggtttcacttctttttagcttcctaagtgacatgtgtcttgtctcgtggatcatcgactgaggttgaagtaagagagttgatatccaacatcatcttaaaatcaattcattttgagtttttgacaattcatataacctaaactaaggaaagtatattgatccatgccggttttctacctggaacattgtctgaacttcttcaggttctgacacgttttttaggctttcattgcttaattttagtgtgtttctcaatttgcttcgatacatatcagaatcgtcttcaagcagtttccaggttttcagctagaaattccaaagtatgtgccattgctgattacttatagttcgttcaaatgaaattttcatcaaaccatacagcaagctaggtactttcattcacaagccactaggaacttcaagcactggtgtcaccatttctggttgactaatttgttggttgagacttgagagtacttttagatgaaattgcttgaaaacaagtaattgttgcataacaagttacagggttaaagttgttcatgtataattgcttgtttcctacttacatatatatatgcagcactactacattttctgtcgtacagactcatttggagataaaggctggcttctgagtgtgaatctctattcttatttttttttttccaatataaatatgaaaagaatttaattaatagctattaattaaggttgaactttgaagtcgtggatcatgcacaaaaacataaggagagaattgaattggtcacacgtgacacgtttgcaataataaaaaacaaatgaaaatccgacacgcataggctctattttcacagccacatttaactaatcaaaaaccactcttccacaacgatataaaaaagtcatagaagggaagagataaacataagacagaaagatcaaaagaaaaacagaaataaatggcagcactgggtggctttaccgacatcgctggagcacagaacagcatcgatatcgaaaatctcgctcgctttgctgttgatgaacacaacaaaaaagaggttctttttatttttcttttttcttttcttcatttaagtcaacttttagttacatcttaattaagatattatgatttatgttaatttggtgtactggatcattccatgatcacgtgatttgagaatccaaagtgggtttagtttctttctgtagctctgatacttgacttcctgaatcctgttctgattatgattaggggtgtcacaaataagtaagaattaaacttggtccattataactaactaattagagatttaaatcttaaatggaaaaataatttgtctttggaagggagtatctgacctttgaattattttatctctctcaagagaaactagtcaaatacttataaccatatgtgtataaaaaatgaaatttaattcatttttatatattttgagcagtattttttagttataaattgaaattttatcttactaactcattccattttttaatacaaaactttattatgtgatgtattaaaataaaaattctgattagacaataacatttataaaagcacatatctgagttttatatatttttgtttttatttcagttttctatttcttttttatttcttatgatttaattgaatatgcatggaaacgcagaatgcagttctggagtttgtgagggtgattagtgcaaagaaacaagtggtttctggcaccttgtactatatcactttggaggcaaatgatggtgtgacgaaaaaggtttatgaaactaaggtgttggagaaaccatggttgaactccaaggaggttcaggaattcaagcccatcactgttgctgctaatcctcgttccgtgacggtctagcacatagctaggtatatattttaccatgaaagaaagaaagaaaaaaactggtgatatttaaaggaatcaaataaaaaagaaaagaaaaatgacacttgccgtacaaaacaaacgaaaagttaatgatagaatcatagaatgatagaaagactatgaaaaaataattttgcaaagactatgtgtctctgtttttttttttttttttgaaactaagggactaacaaaaaaaaaattataatgagtatttgatcgacttcacattacaaaaatggatttcttgatttcaaatattatggccttcacgtgcctagatttcttgtctgtttggattattaaatgcgcctttggtgtttttttcaggttaaggaagattatgtaactctagcttgggcgcaagagtgataatatgtatgaactgaataaatgtagctattaactctacaaacggtgtggggttgtgcatgtttgccatcctatttcagtataaagtataaactactacagataaatatttccatcgaaattaataaaataattgattatgtattaatttatgcgtgtttcgtccaatgcgtggatggtgatgattcgaactttatagcagaatgatctggtggtgcggtgccttctgtactcaatgcgattatgaggtcacaatcatgaagtacttgccctccttggatttggacagggtcctaaatatttatcaatttttattagttaaaattaaatgcgttaccatttgtcaataaataaataaaaaggttcaattatttttttcactaatttatttttaactttttatttggttctctaatttttttgaatttaatttgatcttctaatttttaaaattagcttaatttaatcctctaataatttttgggtttaatttggttatctaatttttaaaatcaatttaaattggttacattgtctaaattaatttgaatgatcataccttttaaatgtgtgttttgtggcatttaaaatcatccttaaatatttttaagacaccacaaaagtgtgatttcttaacatgattggctcaatttagaaggcaagatcaaattgtatttcaaaaaaaaataattagagaatcaaatcaaacctaaaaaataaattagacaactaataaattaattttcaaattgcattattatatagacaattgaaacttaaactaatatgttggtatattaagaattatgcatttaacagtacactgattagaggtgtacacgaattaggttggattaggtttgactaaacccgtcacccaacctaatcaaaaaatttgggttagattagattgtgtttgagaaattttttacgaacaaactcgatcatgaatggattgaactagattatgttaattgagtcataatattttaaaataattttattttgtaaaatttaaatttgtatgaattgtgaaaaaattaaaaagaaatttgtttataattatcatctatgactataaatttgaataaatttcctaaacctttaaagcttggctaagatttcataagcctaagcttgacctaccacgggaaaaaaaaaatctcaatttagcaacagaaagttttttactacaacccatcggtcacaaatagcgactgcttctattttcaagcttaaaagaaatattgagatttagcccgtatgttggctgcaaacctatcaaagtctatttcggcagcgaaggaatctgattataataatttgcaaccgaaataatcagtctctgattttgcataattggcgactgaaatgtcggtcgctaacgttgtaaaaatactataaaaacgatgtcacctgtgctattttgtgactgactttaccatccgctaaaaatactattaatttgtgagcgataagctatttcggttggtaatttcattatttatatcaatgtgataaatataaaattaagaattgacaaaaatctaaaatttaaaatatttaattatgtttaaatataaaatatttaaatataattaaaatataaataataataataacaataacataataaatatgtgattattttactttattttttatattgtaattttttacatttttatgtaaaaaaaaataggatagaaaagagacaaaaatataactacgttagattgatatgataggaagagaaaactagagaaaaataggaagtgtgaatatgactacaacataaggatatctaaatattatcactctacctatttatatttaaggtcttttttgaatgtctaatctatcatatataaggattgatataattatataatagaataaggaaaaggtaatgcatgttaattagatgtttgaagtgaataagtatccaaaaatcattataggatactcataaaaggcaaaaagtgaaaaacttcttcaaagcttgtgtggtatgaataataatccgtgagtaaatttcatttttcttttttatttcatggaagcattaaaaattatattatgaggagttctagatacactctctttaatattctctttcggctaatctttttatgattgattgaaattaattaaaaattactaattttaattggtctctcatttaaatcaaaaagagagaatcattaaatgacatgtgaaatccaataaaattaagcattttcaataaattttaatcaattacagaaaaatatctaaaagaaaatgttagaaaaagagtgtcattagcatttttattataagaatcacaatgttagacaggtatcgatcagagtctatatttggttaaataaatttattaattatttactgagtaattttttgttaacttgttatagatatatttatatataagttgcttttaaaatcaaatataaatttaagttagtctatatatatgttttttataagttattataaacaaccgattaaaataagtaaaacataataacttcggacattttctaaaaaaattaagagtatttgtaatttgatttagtttagtttttttttttttacagagatttaatttaacttttagatgaaaatgatgtattagattctatcttaatatttattgacattaattaagtgaaatatattgtaaaattgattggcagatatataagttatatcttaggtcattatcaactcttaaaaatgacatttacattatcataaacaataaaaaattatacgtaataataaatgcattacacacgttttaaaaaatatatattataaaccattcatagttgattagtcataacctttttatttaacacacgcaaaccatctaccatttttttttatgaaacatttaccattcttaaaatcacatactattatgatcaaaaggcgaaagaatatatagttcgttttgtattcatcactacaaatactattatgaacaaaagtgcctatcaaaaaaaatattatgaacaaaagtttaaaatacttctatattatgaatataagcatattaactgtgcagttaggttcaatttcaacaattggatgtaaaaaccaaaccaaagatcaatagaaaatatgtaaattttttttgcagtttattattatttttaatcggtctgatgatttagaattatttagttcaacttaaagacatagataaacccaaataagttctttcaaatgtatcttatttctattcttattgcaaagagaattttcttacccttttcaagtaagcaaaaaaaattataattataagttaacacttcattttttagctagataactttttctttctcatttttatttttaaaaattgattattttaaatataagcaaaccatgacaaatagttccatatatatattttgatagttttattattaaaatttattttaaaaaattcaaataaaataaattatctcaaaatcattttccatataatacatctaattacaaaactaatatcatataatcaattattaaaacaattaatattttttcacagctattctaaatacattttatgatagatccatcaactcattactataagccttgtttatgaatctagtggttgatgattagtctgacacatttttattttttctggtgctactaatgtctaatatacctctttttgatgattatttgtaaagagcatgcatctaatatatctctttttcacatccataataacgtgtatggtcacgaatcaggaacgtgattgtttttttttttttttttgcattcggattgtttggtacgaaagaaacaaatacatgaaatgagaaatacagttgataaaaatggagagaagaaaaatataataaataaaaataggtgaaaacaagtaaaaataaaaacatttaatttaagagaaataaaaataggatacacccggatctttacgaaagaaacaaataaattttaaagagaaatacagttgataaaaattgagaaaagaaaaataggtgaaaactaaataaaaaatataaattttatttaagagaaatacaaattagagagggggagaagttactattcatttctagtcatcgttaatttcatatatatctttttaattctctcttcacctatttctcttttatcaaatataatccatcattaattttttattccatatcatcctcattttcttgtttcttctatctattatatctctgccaaacatatataatgtaccagctttcacagtttcacaactaactcataatggagacataatatgtagttcacacttcacatccaaacacgtgcttaaatcatgggtgagttgtgtccacaagtatccaaaaatgtcaaggttgaagttaatcacttgtctcccgcttattcttctgcagtaattcattgaaacacccacgacaaaacgacgtacggagaatatgaaatttttgttaaaaaaatgcaaatgcaatagttaaaaaaaatgctttttgttaaatattgacaaagggaatatctgagattggtcacacatatgcaaatgcaatagttaaaaaaatgctttttgttaaaataaaaaacataaaaaacgtacatgaataattgttataaataataattaaatatacacactcagtagcggagatcaaggctagcataacagtttttaacatattcatgtcaaaataataattattaattattattattagaatttattaaatgctccaaaatcataaataaattcattaaataagatgtaagatttacaaaattttgaaatttaaaagaatttcaatcaataggaaaaaaatcatatttaaaatgtattactaacatttttcataattattagaattaggtaaaatggaatggactattcttttacaacattggatcgaataatagttcaaattcttattagaataagaatccacgtttaatgcatgacatataattacctcaaaaacagtatttgcataagacaaaataaaaatatttcatctttcattctcttgatctttttttgtttaccactcaaattcaatcagaatgatataagataaactttgatattttccctataaaaagccttagaatagtagtgatgtacaaaagataaagaaaagagaaatggcaacagaaacaaaagagccagtgagtgacaggtggcatcaccgatgtgcctggagctgccaacagcgtcgagatcgacaatctcgctcgttttgctgttgaccaatacaacaataaagaggttctttctttaattttcttcctttaagtttcaactttacaacttaagaattaattaacatcttaatatatgcatgtttaatttaatttatctctatttttatacttgtggtgattatattggagttggaaatgcagaatgcaaatctggagtttgtgagggtgattagtgcaaagcagcaggtggtggaagggttcatatactacatcactttggaagcaaaacatggtgaaacaaaaaatgtgtatgaaacgaaagtgtgggttaggtcatggttgaactccaaggaggtcctcgaattcaagcccatcagtgttaatcctctttcggtgtcggtctagccttaataaggcatacttttaatctctgtcctctcgataaatatttatttgtattagtttctatatttctattttgatcaaattaatctttaaaccttagaaaaataatactggtttcatcattatttttattcttaggaggaacaaattattttctttttttaaaattcgagaattaaattaattaaaacttaaatttgagaactaaaatcaagttttattaaaaaaaatatatggaccgaaaatatattttatcctttaatttactaaactaccatgaccaaatattctgggcgcgcattcatatccacagtgtcgttgtctgttgggattgtttaatatgtcttgtctttcacgttttttttttttttcaggttacagaagattataaatggtcgcaaggtgaaagttaaagtatatatatgtatatgtatgtatattgcattattccttcgaaggtaatgtgagagaataaaaaaactcgaaggtagtattaaatatgttatatgtatttattgtatggaataaatgcagctactatatataatggtacagacggtgtagggcagtacaaatttggcatcctatttcaatatgaacgagtactaataatattacgtattgattattctgtatttacgcgtaaatagctaaatgtttccaattgatgcactaagtgatgcaaaaaaatgttcctttgtttagtttttaaggacaagatgaaaaaaaagtgaaaatacatccacaataaaataaggaagaatattagagtcaaattctcaaactcaaacacactcttttcttcaccagtatctttcatcggttcatctcattttattttttaaaatagttacttgtttaccggttattattcaggttatgacactttataagtttttattttgttttattatttatattttaaagaaccaaaaatcgtctatccctatgcctatcaagtaacttgcccctttattttattcattggcaaagaggttgagtgaggatcaataaggacgaggttaaaaaataagatgagatggaacaatgaaagagagtgggataaaaagagtgtatttgagggtgtgagactctctctacggatatgttattatagttccaagcaaacaaaaatgtaatacatgcttcaacaaataaggttccctcgcgaggacttgcccaaacagtcaaggacctattttttaattaatatccacagaggaatttagatcgaataaagtgataaacacaggaatgcatcatccaatttaataagacatatcactactcatatgttgtaactgtgtcaatagaaattcggctataaaatttcttcacacaggaatgcatcatccaatttatcgctctggcttattcatcaccattgctgatttattccttttcttccatttttcttgtatccgacaacgacacctatgcagaaagcaattttcggcaacccctccctttcctcctttttccctattccacatccacagatggtcactacagtggtggagccacatagaaaacaaggccaggttacaaatattacatatcaacggtacaataattttcttgaaactgcaatttcaaatataatcacaaatcgtcataaaaaatgtcatgattttcaaaaccaaaatcttaggtcttttattcttccaaattggactcaaaattgagagtaaaaatggtatagaaacaacgtttatgcaagaaacaaactcgtaacttggcacccatgagaaaaaatcaacacgtacacaaaaaatatcaaaaagctcaaaactttgggagactaaaatctgggtttgttcaaatgaatccaatttgggtttaagtgaggcaataattatatcaagctttgtgactgtttcgtcttccatgctttttctcttgtttgaaatcttgtggcagaacactgcaagaaaaacgacaaaagaccctctcgagttctctctagtttactccgcacaacggtcaggcaacgacgcatcaacatccctactatcatcggccgtcatggcaccaccgttgccgcttagatgaaggaggaagaatgggaagaagagacgagacgaagaaagaggaagatggtagtacgggaaagaggaggacaaaaaaaggaaaaataataataaaagaagaaaaatttacggtcattgatttttaaataagataatctgatggtgataaaatactttctgactataagagacccattacactctcccattatagcttgcgtcttcctaaatttacggtcattgatttctggttattgtagtgagtttaataaaattcatacatttttcgataataaaatgcatctagtcttgctttgaattcaatggttattggagtagttgactataactagtactagttttagtacccgtgcgcatacgcacgggacggctccgcttcgctccgccgtgttatgctaaatttgtataaaatatttttaatatttaatgattaagaattattgtataagcaaacttaaaaattaaaagtaaaacataaattactaaatatatcatctaataataaattaagcactccactaataacttactctaataaagcaagcatgaaaacatatttttagaagtccagaatgcaaattcttacaaaatatagtggtcaagtgctctaagatgaagtcataattacaagaacaaaacatggttttgaacatagagttaacatttgatagagttaaagataaaagatgtttttaacaaatatatcagtacacatgattgttgctgctgggatcaggaaactcaattacaaactccatatgtggtttgaatttgttgtctcttgcaaatgatttccatccatagctgattttaacatattggcgtgaatggttgaactcaattttgcatgccttggtttcataaaaaataatatttgtgaatgttgttttaattaagaaatcatacatgtctctaggtagatgctgcaaaatcacgtaacggttaactcatgatgacataaaaaataattatttcccataaatgataattgtagtttctatcataaaaatgaaataccaaaaaattatttacattataatatagtgaagaagcagtttaaaactttcttgtaacaaaaattatttttataaattaattttaattgttatctctatcgtatttaaaaataattttatttatgatattattgatgaagttatgtaaattaattgattttgattttcttataacaaagaatcaaataataattttttaataaatatattaactaaatatcattatactggttatcgtaacaattgaattaaataaaaaagagtttaaaaatttcaaataatgattaaatttaaataataaagttataaatttttttattttttaagaatgtcaccatattcattttaaaattatttatcctttttttatatgatgaaaatttaaaaataaataatatatttaataaaacaaatattgttgattatttgatatgtaaatgtgttaaatccttaaaaaaacataagagttcactcatgatagtccaaagaataattgcttcccgtaaatgataattatagtttctatcttaaaaattttaaattaaaactaatttacattatgataaattaagtaagtaatttaaaaaaaaattgtaacaaaaatcatttttaaaaattaatttttatttttatctctatcataactaaaaatatttttatttatgatattattgataaattaatttaataaaaataaataaataatatatttaataaaaataaatattattgattgtttgattataactatgttaaatactttttttaaacaaattttttctctataacggttcacccatgatggtctagagaacaaactttttctatcattaaaaaataaaatgaaaactacattatgatatattaaataagcattttaaaaaaaatttgtaaaaaaataatttttataagttaattataatttttgtctctatcataactaaataaattttgatttatgatattagtgataaaataatttaaattaacaaatattagttgtcctataacaaagaaataaactataattttttaataaatatattaactaaatattattatgctggttatcataacaattaaattaaataaaaaaattaaaaatttcaaattctgattaaatttaaatgatataacatatgcgtctacatatttatgtgtccatatttctattgtttataaattaaagaggaaaaacatagatattcttgtatatttattttattattggaaaatatttcttatatttatttaggaaaacacatttcaagtatctcataataaaaaaaattaaagaaagtagtgggatgtttcttaatttaaagaataaaaataaatgacaatatgtaaataatactgattatttaagaaaaaattaagaaaatagtgaaataatatgaaatcttaaatttaaaaacatattgttatatctaaattacaatacttaacttactatattcatccttaaaaagttttaaaaaaatataatttattcaatataattatgaaaaaaaaaacatctaataatggctgtttaaaaattttggtttgtagttgattaaaattaattaataaaactaaaaatattgtttaaaatttttttctcgtaatggtttattcatgattacctagagaataattatttcccgtaaatgataattatagtttctgtcataaaaaaatgaaattaaaattaatttgcattatatgaataagtaatttaaaactttgttataacaaaaatcatttttacaaattatttttaattgttatctatatgataattaaaaataattttatttatgatattattgataaagtaatttaaattaattaactttatttgtcttataacagagaattaaattattattttctaataaatatattaaataaatattattatgttgattctcgtaacaataaaattcaataaaaagagtttaaaaatttcaaatactgacaaaatttaaataataaaactaataatatttttatttttaaaatgtcaccattttatgttactattatttacccattaatttctatgatgaaaaattaaaaataaataatatatttaataaaaataaatattgttgattgtttgattataactatgttaaatactttttttaaacaaattttttctctgtaacggttcacccatgatggcctagagaacaaactttttctatcattaaaaaataaaatgaaaactacattatgatatattaaataagcattttaaaaaaaatttgtaaaaaaataatttttataagttaattataatttttgtctctatcataactaaataaattttgatttatgatattagtgataaaataatttaaattaacgaatattagttgtcctataacaaagaaataaactataattttttaataaatatattaactaaatattattatgctggttatcataacaattgaattaaataaaaaaattaaaaattttaaattctgattaaatttaaatgatataacatatgtgtctacatatttatgtgtccatatttctattgtttataaattaaagaggaaaaacatagatattcttgtatatttattttattattggaaaatatttcttatatttatttaggaaaacacatttcaagtatctcataataaaaaaaattaaagaaagtagtgggatgtttcttaatttaaagaataaaaataaatgacaatatgtaaataatactgattatttaagaaaaaattaagaaaatagcgaaataatatgaaatcttaaatttaaaaacatattgttatatctaaattacaatacttaacttactatattcatccttaaaaagtttttaaaaaatataatttattcaatataattatgaataaaaaacatctaataatggctgtttaaaaattttggtttgtagttgattaaaattaattaataaaactaaaaatattgttttaaattttttttctcgtaatggtttattcatgattacctagagaataattatttcccataaatgataattatagtttctgtcataaaaaaatgaaattaaaattaatttgcattatatgaataagtaatttaaaactttgttataacaaaaatcatttttacaaattatttttaattgttatctatatgataatgaaaaataattttatttatgatattattgataaagtaatttaaattaattaactttatttgtcttataacagagaattaaattattattttctaataaatatattaaataaatattattatgttgattctcgtaacaataaaattcaataaaaagagtttaaaaatttcaaatactgacaaaatttaaataataaaactaataatatttttatttttaaaatgtcaccattttatgttactattatttacccattagtttctatgatgaaaaattaaaaataaataatatatttaataaaaataaatattgttgattatttaatatgtaattgtattaaatatttttttaaatctttttttccttagtggttaactcatgataaataaaaactaatttacattatatataatgagtaagtaatttaaaattttcttgtaacaattttttttaaaacttaattttaatttttatatttatcataactaaaaatatttttatttatattattgataaaataacttaaattattaactttaatcatattataacaaagaatcaaactataggccttatgcacaaataaggttctcaacttttgaaacaatgaaataatatataaaacttttaaacatcataaaaaaaatggaaagctatagccagttcttcccatgaataaaatacaattaagaaaggataaaaagaagtatcacaagaaaagtactacatcacttccaagagcaatatatacatcactgaattcaaggccaatataaccactacctagaattgctatccaatctggaacaatctccagtttgagtgtatgatcactggtaatcacagtcttccttggatgcacttagttagctttatagtccttttcttaataccttgtcttcctttcgtgctttgcccctctcttttgcagctgctgtcccaaagatgagcttcatatcttctagtccacctatgcttgatacaaaaacaccctttagaaataataaagagaaaaaccattgctcatgcatgaaccatgacatcaagtgaacaaaatcataaacaactcaacatagcatgcttgtacaattattcagccattcataaattgaaagtttaaacattaaaacaaacaaaaaaaggaaatatgatcatttacctcatgagaaagatgttgaacttttggccaccggtggttggaaagatgcaaatctcatgatttttaacaacttgcaaaataaaatccacatacagatttcaattcagtaaacgaaaatgcatacatcaagtagaggggagaaacatagaaaaaatcctacacaagggaaagcaattattgatcatttaggtaaaaaaaaaatcatgtaaaaaatgaagtagttgaggaagcaaaagaaattacaaaactgcatatctaattagggtggggacttcaaaggagaatgcttaagtgcaggaaaaaaaattgaaatcatgcataccagtaacaacataaaggtaagtgtatgttttgaaagtaattatatgcctcaacttcttaaacactcttaattggtgttagattactctttttagaaaatctcttccattcgaatccatataaactccttgtttgtggccatatttgttgtcatcatcccataaaagtgaaaatataaaattactaacaatacgcatcttccattttagactttcaaaaacttgaattgatttgtgggaacctataaaatatttacctctaaaatatcttaggtgaaagttatatgtgcttgtaacaactttaacctcttggtggctgttgcagcttcttcaaatcttctctgaaaaacctgaaagatatatgttcattaatttaatagaaacaaatcatatatcaattacaataaccccaaaaatcaacaacattaatcgtaggttatttgattatttttctttttcctattaagaattttgcatgttgagtggaaacataaagggaagtatccactacatgtcttttttactcatcctctctctcagccatgacttaagatcattacctaaccaaataataaatgaggttttatgtccacataacatatgtgattccaagcaaatactcacgtagcttatcataagtttacattcagaatatcaccaggttgaaacagtttcaatatcagttgtaaagtcatgagtcatgactgatgaatagaaaatgtagccagtgagcataatgctcattgcataatactccctaaccaaatgacaatacataaaacatctgatatatataatgatagctgcagaataaaaaataatataaactgatagcccacaacttaataagctgatatataattatatgttattttacagagaatattaacatttgatagttctagacttaacattttctccaaagaaaacaaagagagagatagagttttaacatacagagagtttatgctagtgagaagaacaaaccaataatattaagcattagtctgtcggaaaactcattttttttaaaaaaatagttaaaataatcaaaacggaaagaaagttgtcagaatgtctaaccgaaactgcactcaatgggtaatgttgccgagccttgatcttgtttgttgtatgggcgaagcaaaaatccttcaatgtgaacaaagaactcaaatgctatccttacgaagcagtaactttaaatctttaggaaaattactatgtgtatagacttataccccaaaaaatacaaaggttgaaagaattctgaatagttagaaagttatataggttaaggagttgaatagagcaggacaggacatgattagagggatgttcatgctatgattcactcagatatataaaactcttctcaagtaaatgtgttttgctacaattgttctcactgtcagttacattgggatgaaaatacacgaacaaaacatgactactacacatgtgtaaaaaagatatgtaactgccagatgcttggaattcatagtgtgtctaaatgctaaaaatgtaaccctctaataattaattgagtaaaatttcattcacttcttagtgtttaaagtgcgaaaatagtgtttacttgatagtgaaaattatatttcactacacaaccaacggcagaaaagtaaataaaaacagaaatttaaatccaagtaagctgaggttagaacataacagtcatgccaaagatgagcaggatgaaaacagagggagacaaatgaggcagtgaggcaggcgttgataatttctcatcaatatctaactatatcatagaatgagtgaaagaagaaaaattgatcaaaggagaaaaaaaataggtacacatctttcccttgctggcttgcccttattacaagatgctaattacattgaaatgttgggtatatttatatttatatgtttatatataattagcatataatctttgatgttgcctattacaattgtgtgcaaattcctaacagagaaaaatgaaagctgttatttagatatgaatgcatcacaaaaaaggaaaattaaaaattacctgtcatcatcatcttcccatagataagtatactcctgctcatagtttacccaacattaggaaaaatagttgattgaaaatcagtaataatcaaagaaaaggaaataaaaaaaaaggatgtagctatagctcttttctgtgtaattagcatccgtcaatcacctctacttttttgttatttccactatataatgattttgaatgtgcttcatcatcatctgtcttccagaaatctgtagtgctgcatccattatcccaggatggcaaacatgcaacactctttaagtggatcagctgcaagtgtcttgggttgattttaataaaaggagcagaaaaagtagagaaaaaatataagaaataaaaagggactataaccaattaacacaaacaataaataatagagaagtaatagaacaaatttgacatacaaattctagactgtaagaacataacttggcatcgtataatttataaactaactgctaggcaagcaaacctttgtaacaccatgaaagccgaatactgccactgcatgtagttctgttcagcaagagataataaaaaagaaaaaaggattaaatattatgggaagacacgtgacacctacaataagtcacaccttatcatattaactattatgggaagtgtgcagatcaaataactaaattctgcaagccatatttttgttttcgtttttcttttttctttggattcaagacaattgataactctattgaatattagcttcatattgcagattacttaaggatattacctcagaaactgatatgaccctaagttttcctggtgctgcatgacctagaaaattattagtctaaaggctactgcaatgcataagaagtgaaatttaagcttgcaaatatattaactaaattactatgatttaaacataacagtaatcatttaagcttgcaaatatataaacttagcaccctattgctctttccttcaacaaagcttgcaaggatcactttgtacatttacatcagaatcaatatattctattttctctaaaattctctaatttctaagaactaaataaggatgacataaagcaactaataacatcatcctcagcttctatgaatataacaaacaggtttaagactaatatgagataaaagattttgagaacatatcccaatcattcaatcaaggctaatatgaggttgaaaacagaaaaacacactgacactggaatccccatttggcatttgttcctgtcctttgttaccaaccttctatgacaaattatgaacttttgctggtcttgatcttttagatgaactcctagaaggagcaacctttgttggaacttcttcgaccaaagcctcaacattcctaataatgtatccttccatgaaacattcctacacccaaatccatccttccatgaaacatataagtgacaacctgcccacatagcattatattacaatttcctacaactcaatatttacagaaattggaaaaaagcaaaacatagatatgttgtggcatagaatttgaaatggctagcatttgtcaattatctatatataccttgggggaacgcctgaattatcagcaataagaggtaagctgaattcatcttatgtagctggactgatacacattttcaagttttgcattgtacccaatgaaaaacttttcgatttaaaattcaactattaaggaagtgccacatgtcattaacttaaaagttccatttactcttcttcaaagttgaattcagatccaagggcaggtgcagtttctccaggccaacctaccatatctgaaaaacaataatcagtttcctagagtcatgaatttttctctggcatcaataaagtgaataagtatattgaacaaagtacatccaattatactttcaacattgaaacagtcaccagtgagtgctgatatattgagatttgacaaagttaaaatacaataacattgataagtatcattttttccagagaatcattatattggagaatttattgttatgtccattcaattcaattccagaaagttaatataatacctgtattgttatttcttcttcgaagctagaggaccataagcaacattctttgctcaattcaatttgatttaaacgattccatatgttgcatttgataatgtgctgattctatgaagattcagtaatatatataccagcatcaatttccatcagttgaattctgtaaatcatacacaagatatatcagcaaaatatgagccaggagtttttgtatttcaacttcttacataatctgattttagtttagtagttattttcaattttagttcttacatatatcatctcttcttgaagtgttaccaactttttctaactgatcatgaatgtcctctgcacagaggttgagtcttgatttggcactttctaaattctgagcacggaatgcctgtttttgaattgcatattgcaaaatactcattatcaagtagtagaaaatcaacaaagtttaacatgcaacttattaaaaacaaatggcattagctgcagcagagcaacaattattaacatcaatgtctcgcctagataaacatattttccaacacatctaatcatgcataccagtacaacactatcaagaattattaacatcattggcaaatacattaaggacaaaagtattagaggatctttatctttctccatttaatcattcatatataaagatttaacattaataagttgatttaacattaatctatgctataaataaatcaaaagcaaagggatgcttctttctatatatgagaaggcaatgaattcttgaaacatgatatgtataatcacttcaccactatcaataattatatccagctgttcattacattgatcaagccatacggcaaataaatgggacaaagcaaaagaaaaaggtaaaaattcaaatctccatattctctaatatccgcattaacaaaatgtaacatgaatacatgatctaaagttgttatgtaagtttattttcatcgagttctaataatttccttaggttctagggtttttagaccagtagcatattgaatgcatacaattttaactgtaacaatatagtttcatttaataagtgttcagttcacagctaaataagagcagaaactaatgttcgagtcatgcatctagctattaacataacaaattactgttaaggaaattatattgaagtttggaaccaagtacacactccattataaatttggcaagaagaaccattatgcagtatttcagctcagaagtaaagattgaaggcaaacctcaggcgccatccagaatgttgtccccttcattgatttaacgtcattcaatttggttgcctgaaaaacaattcataaagcgatatcagaaaattgaaatcataagcaatttaacattattcagacatctataactgatatcaaaatattcaagaaataaaagaaatcctagatcgagaaacataaatgaaagaaagtgaatacctttgccaatccaaaatctgcaagcttgacagatccacttgcatccaccaatatatttgcacatttaatatcccttaaattggagaaatacaattagaatatatttacaatgattgcttcatcccaatgacataactgatacaggaatgcagaaaatagaaagtgaaattaatcacgagctttaacccaaagaaaaaactcttctcatttaaatatccaaagatatgccacagtgaaggagcttttggccatggtctctgaaaatttcaaacagataaacattagaaaacataatagcaaagagaaggaaatggatggaggaagagaaaaagagagacggagcggaagcacaggtcacacaccaaatttcaaaaagctgtgaggcagaggcagaggcagcggtggtgcggtgaggaagaaagtgaaagataagagaaaaaagaaaaatagagaagaaggtggaggaagagaaagaggaaaatggaggagatgaatttggtggagaagagaaagagagagatggactggaagcacaagtcacaaccaaatttcaaatttgaaatttgaaattttgaaagaataaagcagaggaaggaagaagctgtgcacgtgaggtgagtgtgtgagttgaggaaggtgaggaaaggtgagaaaaagagaacggaggaaaggaaagaaagctgagaatgaaggagagcttgccacataggatttggaaggctgtgggagtgacacgtgcacaagccaaaccttcttttattataatatagataaatgcgtcaacggaagttagttaaatatataataaatatataacgaccgctatcatatcattgtacaacgaagacaggtaacattaaattgagagtaattacacgctcccatcctagcccgggtcttcctaaactttataaaaatgtgttggataaataatcatagaattaaatgtgtcaaccaaagttagataaatatataataaatatacaacaaccgctatcatatcattgtacaacgaagaaatataatattaaattgagagtaagttaattaacagtgtcatgatagctgagtctcgctaatccccacaatttaatgaatataattttttttttataatggatatatttttttctgttaacaaatttaatgaatatatttatttactttaaaaaagaattaatattataaatttagaaatcattcaacttaaaaagcttttgaaaaaaactgtaggggttgaggtgttgaacagattgaacattgctgtaatccacaaaataggaaataattattttaagtgtaagttcgaaaactaattaagggctattgttttaccaccatatataatatgttcaagcttcgcaggctggaaagaaagaagcaacacttatagaacagggaatttcagagaggtctccaaatcacttcattttccctagaattaaatcatgaactccaatagcgaagtttcagatgaccacataattcagattaatcaaagtcatgagcaaactccaattgccacttcaacaaactcgccggcaccaaaacatgaaagtagaggagtgaatgaaatgactccagaagagctgagtaagttatacttgaaactattgcattcacaagagggtgcatttcagagatcatgtcttacgagtttgtttattttacattttgaaaaaaattgaatttgaaaccacttgacgttaaaaaaaatatatttatactattattatacgaatgatatttcaacaatgggtttagaaaattattttttattcgaaagataaaaaaagtagaatcacttttaaagtgagtataaataagtcacatgttaagatcaattagcttttgtcaactgaagaaaataaaaaataaattacttctctcaaaaaaaaatttacttatcatcatagaattaattttcaaacttaattaaaggtgattgatgattggatcccttcgactactacataatctcaaatttctcaggtagatttcaatttacaaatgatgaaattattaagaattcaaaatttgagacaagtttccaagagaatttttacagatttagggtaaacgagaaattaaaatggtcttctttgcaactaaatacaaaaagttatgattattatataatggacatgttataatgtgaagtttgaaaggattgcaggttctttaaaaatagatctgacggcacatatatggctggatgagtggctggaatcaaaatcgattattgataaatgtcctgatatggtacgctttccgttaaatgatagtggagacacagctcttcatctagcagtaacggaacacaggggtgaaattgtgaaagagttggttaagcgtatgaggccagaagacatgctaataccaaactcatatggagacacagctcttcatgtagcagtaagtgaaggcagtcttgaaattgtgaatgagttggttaagcgtatgaggccagaagacatggaaataccaaactcaagtggagacacagctcttcatctagcagcaagtgaaggcagtcttgaaattgtgaatgagttggttaagcgtatgaggccagaagacatggtaataccaaactcaagtggagacacagctcttcatctagcagcaagtgaaggcagtcttgaaattgtgaatgagttggttaagcgtatgaggccagaagacatggaaataccaaactcaagtggagacacagctcttcatctagcagcaagtgaaggcagtcttgaaattgtgaatgagttggttaagcgtatgaggccagaagacatgctaatacaaaactcatatggagacacagctcttcatgtagcagtacgttacggtagtcttgaaattgtgaatgagttggttcagcgtatgaggccagaagacatgctaataccaaactcatatggagacacagctcttcatgtagcagcacgtaaatacagctctaaaattgtgaatgagttggttaagcgtatgatgccaaaagacatgctaataccaaactcaagaggagacacagctcttcatctagcagcaagtgaaggcagtcttgaaattgtgaataagttggttaaccgtacgaggccagaagacatgctaataatacgaaactcatatggagacacagctcttcatgtagcagtacgttacggcaggcttgaaattgtgaatgagttggttaagcgtatgaggccagaagacatggaaataccaaactcaagtggagacacagctcttcatctagcagcaagtgaaggcagtcttgaaattgtgaatgagttggttaagcgtatgaggccagaagacatggtaataccaaactcaagtggagacacagctcttcatctagcagcaagtgaaggcagtcttgaaattgtgaatgagttggtaaagcgtatgaggccagaagacatgctaataccaaactcaagtggagacacagctcttcatctagcagcaagtgaaggcagtcttgaaattgtgaatgagttggtaaagcgtatgaggccagaagacatgctaataccaaactcaagtggagacacagctcttcatctagcagcaagtgaaggcagtcttgaaattgtgaatgagttggtaaagcgtatgaggccagaagacatgctaataccaaactcaagtggagacacagctcttcatctagcagcaagtgaaggcagtcttgaaattgtgaatgagttggttaagcgtatgaggccagaagacatgctaataccaaactcatatggagacacagctcttcatgtagcagcacgtaaatacagctctaaaattgtgaatgagttggttaagcgtatgaggccagaagacatgctaataccaaactcagatgggatgcttccagttcacttggctgcagcttcatatggtgacaaccaaagaaaagttaatcgtaagatggtagaaggcaagctagtagcagagactactaaacttcgttgtctcatccacagatcaatagtggacattttgtcctcacagaaagtgcttgacaaaatggatttcaaggatattgaacgactatttttcatgaccattaggttcgacatgtttggtaagtgtaaaactaattaaacaaccttatttctcctttttgtaatctatttctcttttacatattatgaagttttacaaattgaatcgaacccattgaactgatcagataccataagctatatatatatatataatgtttacaattccaacgtcattcgatacaattgaccataattcaataacaaatttaatgaggaatcagttgaaataattaattatgactattaggtttctgaaagactgtgatatcatcctttaaaaccgaacagctcctagctaaattctcattgatttcatatatataaaaggagatatatatgaactcgtacgtggtttttcaatttagttggagtttttatttaccttgccttatactatttaatttgtgcatataacagatttggcattgcgattatttgaaaaacatccaactactctggccattgcaagaaatgaagaggacgttacagcagtgaagatgctggggaaaagactagaggaatgtcaggtaaactttcactagttgaaaatggctttttattttttgtgtgttctatgctaaaatttagatcttatttgacatcatttccattttgattttgatttaagaaagttatatatatttttgctttatataaaaaattaagaattagtccttaattatctatatccagtgtaataatggtatttgatgtttgttgagttattctaataacacaaattaatgtttgccaaggaatcagacggtcggctatatacaaaagtattgactcaagttgaaacatcggaacagaaacgtgaagctgctataaaatcaggaaatgctgacgatgtgaagatgcttattgacaataatcctagattagtgccttatagggaccgcagaaatggatggaacctactgcacttggttgtgctatgtcgacaagaaacaatatttaatattataccattgggattaaaagagcaatcagtacaagcagtggactacggaggtaacaacattctacacttggctgcgcgtcttccacaaggtgaattcgaagaattgtcaagtttaagagcaagcattcaaatgcaaagagatatcacatggttcaaggtcaattaatttgcttagtttttcttattcaacaattctttattcactcgcatgggatcgatcagttctagcaatcttattttaaaaatttaaaattccacaaattttaagattttgttaactagactgattttaaatctttaaaagtaacacgttttaattaaaaatagaaatcattgtatgtagtatttgttgatattgtaacaatttttttttgaaaaattacactaacattctttatatgtttgaaatcattacagtaacatcccctcaaaccttactctaatacctaaggaaattttgtgtaattacactagatcttaggaggtgttgctgtaatttgctcttgttattaagtgatagttgaaagattaattaaatttgggtaccatcatttacatatactcttgatttgaaaatagttcgtggagtcgaatgttcctcgtgaactaagaacaatgagaaacaacgcgggcatgagaccaattgatatattttctgaagaacacaagaagttatccgaagaaattaaggatgcagccaaaggaatagccgaatctggcatgcttgtgtcaacacttgttgctaccgtagcatttgcggctgctctgactgttccaggtcataagaccaatgcctggtttactgtcttcatattgacaaatgcagtcgcattattcacttcttctgcgtctttactctcattcttgtcaaatttcacttcatcaagattcgctcaaagccaatttgtgaaatcactacatcccagcttgactattgggcgttggttacttattatatccgttgctgctatggttgtggctttcactgcagcctcctttttgatatttgatcacacttccaagtgggtttcttatgcagtggcttcaatggggcttttcccaatacttttgtttcttctctttcattttagctttctcgacgaactctggtggtctagattttatcgttttgaaaaactggactaacttattacagagttacagatattggcataacttcaagacactgtattattatttgtttgtggaacaatcaagcttgtgtttaaatttgagattattctacattttctatctcattaaatattacctttattattgttcccgctttaatttgagactatactgcataacgcacgtcaaagcttttccccttccttccatgtggttggtgaagggatcaaatcataacacagaaaaagctttttttattacacattcatctttcactgagacttaatcctattccatttgaaaagaattactatatacaataaaattataataaatataaaattaaaatgaagagaaataaagagaaaaaaaaaatattcttgattgaatgtgttagaaaatgagaaatgaaattatgagtcctaaccaaaccatatttctcactaagagacgtgaaatggagggagaaatggttagcagtattcttttacttatgtttaaattttaaaaaatcaaataattgttttataataaaatatttttatgttgagaaataatgaaataaaaagttcattttcaaattaaatttgattttttatttgtatgaacatttttgcaatgaagatatttttgttttctactctcttatttattcaaacaaataagaatttacatttttttcttgttatttctattcatctaaataatacattattttcatcttattttgtgtatatttcttgagtagagttatgcattaagagtgtaaaaaatttataccaccatccaatcataattcactgtgtataataaatttgttgatttttaaaataataatttatgattaaatcatttgtaaaatcctaaaattgttttatattattagtatatatacattaaatttttatttttatccctcttatttttttccatttatctgatttctcatcaaattcaagataacaaaaaaggttcaagtgcaaatcatgtcgtctgatcagtgagtttgctcctcaaatttgctctcaaattgtactcgagaggacacgttatgtgatacaatagcagacttacatacacaaggccacaatcaaagctaaaataaaatcaaaattcctaagtttaaggatctgaatgtagtgcctactataacctatattaaaatttctcaaataacaataccgtggctatttctaattggtgttggatatggctcatctttcgcagtcagatgacaacccttcttattggcggggtcagcagaaagccaactggggtaagtctactattgtatcataggtactgttgtgggcctctgattatttgtaatatttttcttttattagtagtttgggctagggcccatgaatagctactgttagagtttcttttttatcctatttatattccccttgtaaaccgtgtgacttgtaacgagtgacggtgaggtaattatagtacagacaagatggacgtagcctacattgggtgaaccagggtaaattactgtgtcatatctctctttcctattctcttttctgtttttcgatttgtgtgtgattgtcgatttccaacaattggaacattcaatatctccactttatcctaaaacaaagtttgtaaggactaaagttttcaatgtcctgtccctcctaatcttcctaacgactaaggatttgtctaatactactactctaattctcaattcgaactttataaaccaaaacaggttcatctacatttcttatcataatcctcttcctcttcatcttcatcaatccttccatttaagttaattagctagttgaatgggatcaatcttcattttttccatatcagacaaggaccattcagggtattcctcgtgcttctcttctgacatcgatacccccttcctgctgccactgcaacgtccaggctctgtgtaaatcatgaaaaaaaaatcattattcagataatatttaacatcaagctgctgcgaggttctttagaatgttgcatctctcagctagaatttccacattatgtgctagtgctgattctatagtgcatagtttgctcaattacaaccacagttttcaccaaaagttttaagaaaatcagatagttttggttctttgtataataaggtttacagactattaaatgtacttgaatttgaaggattccatagaatctgagaaaacgtattggacctaatacatatgaatgttataagattattcttgctttgtttttggtaagtcctctcttagcctcctcaatcaactacgaatgataaatgttattcaggtagatgttgacaacttatatattttctagaacaaatattattattatataggagattaagaaacctaaacctaggtttcttgaatctttactatacatttaagtctaataacttttgtataaagaacattttcaactgtattcgcaagtcagtgaagcaacttgtgaatttccctaatgactgaagtaaattcttttgtaaacagcaaaagattcacagtctgcatagacaagagataattactcggcagaaggtttaatcacacaagaaaaatttaagctaactactgagaagtaattgatatattaccttgttatttctcttgggctcctcgtggctgtcattatcatcatctttcctaatataaaataaacaaaattcaccacacagaaaacatgttccaagtaacatgagtattaatcagagcacaaacctcctataaacagtatggtcatcacgagttgcaacagaaccaccaaaatcagaaaccctgctgacaatatcttttagaaaatcaaagacattaaaaatctgcactcactgttttctgcaaaggcaaggatgcaagtaactcagacattttagaaactagaaagtgaaggtaaacgccagaacaaacaacatatgttccaaaagcaagaccatcccaacatttaattttcttctgtagatgtcatttacacgtataatcatgtttgtgcatgtgaaaaatagaaggcaaaagagggaaatttaatgagactgagcacattatcattagaattttcagatccaatcgttctaggctgatatcaaactcagatgggatgcttccagttcgcttggctattttatatggccacaacaaaatggtgcaaattttgtcctctcagaatctgcttcaaaaaatggtttataaggatattcaacgactattttttatgaccattagcagcaacatgtttggtaagtgtaaaactaaacatccttttttttatctagttgaactcgcacgtggtttttcaatttagttggagttttaccttgccttgtacatatgcaatccaccatcgctatttaatttgtgcatgtaacagatgtggcaatgaaattatttgaaaaatatccaactgatttggccattgcaacagatgacgaggcaaaagagacgttaacagcattgcatatgctggtgcgaaagccttcagaaattctaagtaagctttcatgatcggttgagaatggtgttttatttatttatttaattatgtgtcaaaaaaatgatgtttcatataagaccaaactttaatttaacttgtttctttattgtcatgttatacatttgttggaccaatcatctatatatgtatgcttgttgctagacatgaaagaggaccacagcaatgaaggtgctcgagcgggtctggaattgtttaaaaaactatgggctcaagttaaacaattggaatatgaaaagattttagagttgataacttgggcagtgctatttgatgcactaaaatcaggaaatgatgagggtcttagttggattcttgattataatagcgaactagtgacaatgataagggaccccaacaatggacggaacctactgcacttggctgccctatatcgaaatataagcatttttatttagtatacttaggaagatagagcaaatagtaggagcagtggacaataaaggtaacaacgttctacacttagctgctcatctgccacttgaattcaaagcattgtccagttttagagcaaccattcaaatgcaaagagagctcgcatggttcaagctaggtcaattctttttatttttaatatcttgacttaaaaaattaacttgtaatagttattaagtggtaattaaaagattaatcaagttatgcattgacattaattgatcccaaccaatgggcatatatgtatacatatttggataccatcattgacatatactactcttgattgataaatagaaagtagagatggatgtcccttgtgaattaaggacaatgagaaacaacatgggcaagagaccaattgatgtattttatgatgaacagaagaacttatctgaagaaattaaagatgcagccaaaggaatagctgagtctggcatgctcgtggcagcacttgttgctaccgtagcatttgccgttgctctgactgttccaggtgaaaagaccaatgcgtggttcactgtcttcgtattgacaaatgctgtcgcattattcacttcttctgcgtctatactctcattcttgtcaaatttcacttcatctagatttgcagaaagcgagtttaccgcagcctgtgttactttttatctccgttgctgctatggttgtagcttttgctgcagcctcctttctgatatttgatcacacttccaagtgggtttcttatgcagtggcttttcaatggggatttttccaatacttctgtttcttctctttcaatttaactttttccacaaacacttgtgttctagattttatcttccatccgaactctagtaacttattacatatatagttatagacactgctcaaactcaaaaactttctcctcattttctgtatcttgagttatagacagtgtgacagtgtccacactaggttatttgtttgtgaaacaattaagctcgtcttttaatttaagactattgtgcatttcctatcttagtgtttccgacttaatttgagactgtactgccttttccgaaaactgcatatcttacgtcaaagctttgcagcttctttccctgtggttggtgaagggagcaagtatatgtcacaaccactgttattatgttaagaaccatttagatcgacattttaataagaaattatagttattccaaactttgagattgagccccagctattctgtgtttcctaggacttatccatattaaatataaacttcagatatctccaatcagggacggaggcatgtggatctagagctaggatcaagttaactgtactttggaattttagtttcacgtctttcttattagtattccaagtagtttcaaaaccataagaacattctttatgttccaccttagataacgttcacctcatggtaggcaatgcaagtcccggcttttttacgtaaaaggggtaatttttttttttacaaattaccgattgggggtgctttttaaaaaatttacggaaaaggggtaagtcgtagaattttttactacttctaaaaagaaggtcgtaaataattttaggactttacttttttaattttattcccttaaaattgtataatttcttacgacttctaaattgctataatttttaatttacgactttaaagtcgtaaaataaaatcgtggcaaaatatatgactttcatttttttttaaataagtcttaaataataaataaaataattttattaaaattaactaaacaaaataattttaaaaaaattaaacaaaatttaaaaaacctaaaagaaaaacataaattaaaatataaaagtaaaaaaaaaacaaacaaaagtagaagtcgtacaatttcatacgacttctactttaaaaaaataaatagaaagtcgtattatattatacgacttcccaactgaaataaaaaaaatatatatatatatatatataagtgaagtcgtataataatatacgacttatttaaaaaaaaataaaagtcgtaattttgccacgattttattttacgactttaaagtcgcaatttaaaaattatagcaatttagaagtcgtaagaagttatatgattttaagggaataaaattaaaaaagtaaagtcgtaaaattatttacgatcttctttttagaagtcgtaaaaaattttacgacttatcccttttccgtaaattttttaaaaagcacccctaatcggtaatttgtaaaaaaaattacccctttatgtaaaaaagcctgcaagtcccacattgggtagttaattatacaaataattctttataattgtctgacatgtgtactaattagcccaactcccgcttgtaactcaagtgatgttctttgataagtatgcttaaatttatttgttgaaaaaaatatttattttaataaaataaataattttctattttttagtttatttgtctaaattgtgtttatgcttaaaaaacagttttctacttattttgatcaacattatttgtttattaaataagtgcttatttaaaaaatatttattttaaaattacttttttttttttaaatttaaacaaactagtttgaggctagattagttttaaagagcagtgattagtggtgcttatatattaaaaatcaaataagtatattctataataaaaaataataatatcatgatagaaaaataatggaaataattgtaaatgtagtgcctaccataagcaatacctacgtgagattaaaatttctcataagtcataactatactggcaaatggctatttctaattggaacaatttatatctccacttttaacctaaaacaagggttataaggagagtattcaatgccctatccctcgtaatcttcctgaactactaaggagtatctatctaacactgctcctataaaatctactctaattccacataagaacattctaatgacgggcctgtatgagaagtaatgaataaaccaacacatgttcatctacatttcttcatcataatcctcttcatcttcatcaatccttccatttatgttggctagttgaatgggatcaatggtcattttttccatttcagacaaggaccatccagggtattcctcatgcttctcttctgaaactgattttgcagatgaactagtcgggacagaagttggtgtgtctaatgaatccatatcctcatctgggtccaaatttaagtcaaaatttcgaatggacacttcagtagccagcaggtttgcttactggaaaactctgcttaacttcttcaggttccggcagattttccatgctttcattgctttgagtgtggttgtcattctgcttcaatacatcagaatcatcttcccatttggcatgtgaactcatctcttgatctacagttctaattccacggcccctacccctacctctgcccctaccccttcctctgccactgctatgtccaggctctggctgtgcaaatcatgtaagaagaaaaaaaaagttcgataattcagataatatttaatattaaacagctgccagattctttagtgccaattctatagttttcagcacaagttttcagaaaaccagacagttttggtcctttgtgtagtaagcttttaagttgaagtggggcctagcctcgcagactattagacatttagacgtacttgcattcacaagccactagcgggtttccctattgactgaagtaaatttttttgtatccagcaaaaggttcacagtgtgcatggacaagagataattactcagcaaaaggttcaatcacacaagaaaaatttaagctaaccactgatgaagtaattgaatacagtttataaattaccttcttatttctattgagctcctcgtcgctgtcattatcatcatctccggcaactttcctaatataaagtaaacaaagttcagcatacagaaaacttgttccaagtaacaagagtattaaccagagcacaaacctcctcttagtgacagcatggtcatcaccagttgcaacagaacagcctaaatccggaaccttgctgacaatatctttcagaatatcaaagacattaaaagtctgcacacactggtttctgcaaaggcaaggatgcaagtaactcggacattttagaaactggaaagtgaaggtaaacactagaacaaaaaacatgttccaaaagcaagaccatcccaacattttcttctgcagatgtcatttacatgtctaatcatgtttgtgcatgtgataaatagaaggcacaggaaggaaattgtttgattgtgcatattatcattaggattgcggatctgatgttcttataagtacatagtaataaccgacctccaaaagaaagaaacctgcagccttgtaaccaccttgaacagacttgacatagacaaatgaaaagcattcatagtctttgcccccctcctcaaagttatctcatatgttcgatcacacaaatcttgcagaaataactctagtgctttagctgcaatacataaacacaaataatcataaatcagagataattcatagaaactcccaaaagcaggcaaaaaaattacaaatttggagttattttaaaactatttataaatatggagccgtcaaacatatctaaattggacgtgactgaacacccctaatttattgaattaaagatcaactgagtcaccttctaccagtatattgttgtagtttgttgagaatactacaagtgtactggttgtacaattgataaaataaggagaagttattgtatcaataaaaaatttggtttatcaacaatcaacaatacatcaatcaaattattgattactcttttgatttaagagataaacaattaggaatttttggacttttttatatttaattgaaagaaacaagagcacaattgaatactgtactagaaaaatcaattaataaaaatggttaggtgttgaaattcccttgattccaccctaagataatctcttggtcgtcttaattatgtgattcaatttctcttatttagctaaacttcaattcctcggacgataaacccttttttgctgatgataagctctaatccccttatgtcagcaaattaaagaaaggcatggaaaattcacacaagtgcataaaatttatttctatacttgggatttgaatagaactgaactgttttggtattctgaaccaaaacagagagattgcaccaaattgttcctgtgaaccaaactaaaccaaaattagtttaaaagaattagtttcaagttatgctaagccaaaaaagagtttgtgaatagaaagaaactaaaaaatagtctattgaccaattgcaaatcgatccagtagcctactgatcagacattcagacatgtatttgactagttgaatcgccaatctgaagatggtttttgtaatactggttgcaacctcgtgtgcgaatatcttcgtcaaacaaacacaataccttaaatttgatctctcttgttttgttttatcctatcatttaattagtttgcatttatttttctctatattgctactcatgttccactgtaacattcgtagtctatacggagaaaatggaagagcaaacaggcacatacaattagaaaaaaacaggtaatccaattttcaaagatgtagccatgatttgtaaatgaatttaatggttgtgaaaagcttaattttatggatttagccgggcatcataatgtatataaaagtttcaaaataagatcttggatggatatttaatttcagatcttgtaatattaagctgttgattcattcaagaaattgtttttgttcagttctttttctgcttttgtataggtttgcggtttgtcaatgtttgtaattgacacttgtttgttgctgctctccaacaacttcatggtagggcggagaaattggagatttgtaagaaattaagagcactataggcagatggttcaagtttaggcaagaagatgattgaaggagatggaaaactaatcaatgtcgatttggaaatagaagatgaatgtagaatatgcttaaaggcgggcaccaaaatgattttacataattaattatggttagaattgattatacagtaatgtaatttttgtttggataatagttattagaaaaatggtttttttaagaaacggggagcaaaagtctagctaatgggattcatctctcaattctattgacaccccaatctcattagcaccgtaacattcactctaaaatttcattgatgaaaagatgaataaaacagagggtcaaaccatactccatcaacatcagaaaagggatttattatgagagagtgttgtttgaattaaattgattttgatggtgtaatgatcaaaatggatttgaatgtctatatacactgattttctattacaattagttattttgatgtatatatatatatatatatatatatataaaattaaacccaaatctaccaataattaaactgaaatataatatttcctttcataaaatggtttatcacactattatggttatgagtacaaaaataaattagataaaatgcattcaataaaaaaatataacaactagaatctataaattaatatagcaagaattttaatcatgtttttaaatcaataaaaaaacatatagatgcatatgagattattgatttgaaagtaaattagacaaaatctaactagaatttattttggcataagtagaagttattattcctacttcaactccatcataattttttcaattaaatttgattatattaaaataactaaacatgcaaaatctactatatcctatatctactatattatatactacctccatttctatttgtgatgagactcaattatctaattcatcaaaactaaaaaaataattaattaagtcgataataataaatttattctaaaataatatattttcaaaaatactattatcattaatgtttctctctcttctaaatatatatgttaatatgatttctctcttatttaattagggatattttaatagtaaaaaaataatatatacatgagataatatggattataatttaattaacactaatatgttttttaataattatggtaatttttttattatcatggttttattaaattgtcataaatatttattataatgataataaaaataaaaataaatgttatcttaaaaagttataatattgtaagaaattataaattgtaaaattactactgtgcaagtcatgaaccatttaactagttttagataaaatcaagtttgactcatgtcattagctcattcataattttaaagccaaatttcaaacacactataattaatccacattatctttttcgtaaactacacatacaccatatcaaagtcgttttctttccatgtggtttataatttaggatttagggttcttattgtccttgatttaaatcctagatcataaatattatatatatagttatatcttgcatgtgggataatatagtatgaaacacactatcaaatgtcaaacaactaattcaaagcaagatttgaaatatttgagtaaaatatatgtttagactctttaatttagtttaatattatttttagtcttaaatctttcaaaatgtacaatttaatccatagtctgacacagtctagtagtgtgggagagtgtaataggtctccaataaatgataaagtgaatttctaccattagatttatcaaattttaatccgaattttttctttattttttcttttcttcttgactttctcgatttatccctctagcttatttatcaccattgtcgttagccactatgcaccattgccaaaaatcacctctggcggcagcatttcatttttttggcctttcttcttccatttttcttgtctccaacaacgaacctacccagaaagcaatttttggcaaccctctctttcctcctttttccctattccaccatccatagatggtcactacgacggtggaaccacgaccatgcgccaccacgcatcacatatctaaacatagaaaacaaggccagattacaaatattataaatcaatggtataataagttccttgaaactgcaatttcaaatataatcacaaatcgtcataaaaaatgtcatctgattttcaaaaccaaaatcttaggtcttttattctcccgaattggactcaaaattgagagtaaaatggtatagaaacaacgtttatgcaagaaacaaactcgtaacttggcacccttgagaaaaaatcaacacatacacagaaaatacaaaaaagctcaaaactttgggagactaaaatctgggtttgttcaattgaatccaatttgggtttaagtgaggcaatagttatatcaagctttgtgactgtttcgtcttccatgctttttcttctgttgaaatcttgtggcagaaccacggtcaggcaacgatgaatcaacatcaccactatcatcgaccgtcatggcaccatcgttgccgctaagacgaagagaggaagaatggaaaagaagagaaggagagagaggaaaagggtacgggaaataggaggacaaagtaatttgatggtcataaaatactttctcacagtgagagatcgattatcctctcccattatagcctgcttcttcctaaaatttataaaaatgtgttggataagtaattattattattttttttttggatgcatagaacgctcaaaaatttgtttatttattttttaaaagataaaaatttaagttttagtcaataaaaataaaaaatacaataaatttatcaattcattaattttatatcattaataaaataaaatatttaacataaatgaaaaaaatatcataacaacaattaccaacataactattaaatcaaaatgtccgtaactaatataaaaagaccagagttaggatataaaaaaatgaattaatattgaattcaatggttgttggagtgagtttaataaatttatacatattccgataataaaatgcatctagtcttagctttgaattcaatggttgttggagtaattgattataactaagtataaaaagaccagagttaggatataatcatataattaaatgcgtcaacggaagttggataaatatataaccaccgctatggcagaaagttttcgtcaacaatataagagtaggaacttgaaggttttaggtgtgtaaagatatcgtatcattgtacaacgaagataatattaaattgagagtactttaattaacagtgtcatgatagtgagtctcgctaatccacaaatttaatgaatataattcttttataatgaatattttttttatgttaacaaatttaatgaatatatttattcactttgaaaactcaagggttgaaatgttgaacagattgaattaacattgctgtaatccacaaaatgtcatattggacataattattttaagtgcaagttggaaaactaattaagggctcttgttttaccaccatatataatatgttcaagcttcgccggctggaaagaaaagcaacactgatcgaacgaatttcatagaggtatccaattcacttcattttccctagaattgaatcatgaactccaatatcgaagtttcagctgaccacataattcagattaatcaaagtcatgagcaaactccaattgccacttcaacaaactcgccggcaccaaaacatgaaagtagaggagtgaatgaaatgactccagaagagctgagtaagttatactttaaactattgcattcacaagagggtgcatttcagagatcatgtcttaagagtttgtttgttttacattttgaaaaaaaattgaatttgaaaccgcttgacgttaaaaaaataaatatttatactattattataggaatggtatttcaacaatgggtttagaaattattatttttattcgaaagataaaaaaaaaaaaaagtagaatcacttttaaagtatgatgtaaataagtataagtcacatgttaagatcaattagctttagtcaactgaagaaaagaaaaaataaattacttctctcaaaaacaattttacttatcatcatagagttaattttcaaacacaaaattgaaattcaattttcaaacttaattaaaggtgattgatgattggatcccttggactactacataatcttgaatttctcaactagatttcaatttacaaatgatgaaattattaggaattcaaaatttgagacaagtttccaagagaatttttacagatttagggtaaacgagaaattaaaagggtcttctttgcaactaaatagtaaaagttatgattattatataaaggacatgttataatgtgaagtttgaaaggattacaggttctttaaaagtagatctgtgggaacaaataatgcgggagaaatggcccgaatcaaaattgattattgataaatgtgctgatatggtacgcattccgttaaatgattttggagacacagctcttcatgtagcagtacgttacgacagcctggaaactgtgaataagttggttaagcgtatggggccaaaagacatggtaataccaaactcaagtggagacacagctcttcatgtagcagtacgttacagcagccttgaaattgtggatgagttggttaagcgtatggggccaaaagacatggtaataccaaactcaagtggagatacagctcttcatgtagcagtacgatacggtagccttgaaattgtgtatacgttggttatcgggatggggccaaaagacatggcaataccaaactcaagtggagacacagctcttcatgtagcagtacgttacggcagccttgaaattgtggatgagttggttgagcgtatggggccaaaagacatggtaataccaaactcaagtggagatacagctcttcatgtagcagtacgatacggcagccttgaaattgtgtatacgttggttatcgggatggggccaaaagacatggcaataccaaactcaagtggagacacagctcttcatgtagcagtacgttacggcagccttgaaattgtggatgagttggttaagcgtatcgggccaaaagacatggtaataccaaactcaaatggagacatagctcttcatgtagcagtacgttatggcagccctgaaattgtgtatacgttggttatctggatggggtcaaaagacatggtaataccaaactcaagtggagacacagctttttatgtagcagtacgttatggcagccttgaaattgtgtatgagttggttaagcgtatgaggccaagagacatgctaatacgaaactcagatgggatgcttccagttcacttggctgctttatatggtcgtcccaaaggaatggtgtacattttgtcctctgaggaagtgcttgacataatgtatttcaaggatattgaacgactgtttatgatgaccattaggttcgacatgtttggtaagtgtaaaactaattaaacaaccttatttctcctttttgtaatctagttctcttttacatattatattatgatgttttacaaactgaatcgaacccattgaaccgaacagattccataagctatatatataatgtttacaattctaacgtcattcaatacaatggaccataattcaataacaaatttaatgagaatcagttgaaataattaattatgactattaggtttctgaaagactgtgatatatatcatgcatcctttaaatccaaacaggtcctagctaaaaattctcattgatttcatatatataaaaggagatatatatgaactcgtacgtggtttttcaatttagttggactattttatttgtgcatataacagatttggcaatgcgattatctgaaaaatatccaactactatggccattgcaagaaatgaagagaaccttacagcattgcatatgttggcgcaaaaggctccaaaaattttaggtaagctttcacaagttgaaaatggctttttatttttgtgtgtgcgctaagctaaaatttaggtcttatttgacatcatttccattttgattcttattttagaaagttatatatatttttgaattatattagtccttaattatcaatgtaataatggtattagatgtttgttgagttattctaataacacaaattaatgtttgccaacacatgagtcacatgtgaaaaaatattttacaattttttttcatgtatggggattaaaatatataattttttaaatagagataaaaaatggtgcttcatatacataagaataaaattttaattgaagttttgtttgtttcatttcatgttaaacattggttggaccaatcaactatatatatacctcttgctagtcatggaggactactacaaggaatcagacgctggtccgctatttgaaaaattattgactcaagttaaccaattgaaatgtaattcgattctaatggaattgatatcatatgatacgcactactacaaatggccctttcgacgacgcacaaaagaagacggttatgcgaaaaccgtcttcttatggtaggcggtggcattacttgtaaatatactcttattttcaaggacggttctaacattaaccgtcttctaaagctgcgtgttaaaaaaccggtggcatttttgtaaatatgttgaaattatagtagacggttttcgaaaaccgtcttccttttggccatttaaactgattttcttatcgcccgtgccctagccttttcgaaaaccatcaacctcagtctcctcaaacatcctcactctccaatctgtgaaatcaacctcgcattctcctctaacagtatcccatgccctagccttttgccctagcctcactcgccttttgccctggcctttttatctgatttggaaattaatcccgtgccctagaaccattcccaatttgttcttcatttcgttctctcctctgttttcgaagcttggcatcaacagcaccagaactaggtttcgtgcgttttgccctctcactgtcgttcatatgtttatctcctggttacttttcaatttctctactttggagtgtttatttatttttgctccgctatggatttaacttgatgcaactgtaggtgcactctgttgttggaaatgtggcattcctccaaattaggaaccctcactgctgtaggtgcactttgttgacggctgtgagtatccctttccctctcttatgtatttcatccatggtgtcatgaattgaatttgtgggttttgttttctccatgattctgtgagtgactgagttcccatccaaaacattttgcttatgggattttctgaggtttgttaggtatttggagcataaatgtgtttgatgtaccagtagtggtgttactcaaaattttccttccttattggactgctcttaacaaccaggtctctctctatctttatctttctacattttctctttactctttttttttatatgattcatctcagttctggattcgtgttctgtttgttcttatgaaactgaagttggaaaattgggtctgtgtgttggcactttgttgttccaagttcaaatttttatggcttgttttatgttgattactgaacaatttgtgcaaatccaatttttcttgatctcttaattggtggcttttctgaaccagtcttattaattagtttaaacttcaaacataatttttagcctggccatttttcttgatattcagttcgaagataattaaatttgttggttttcttgtctgcagatttcacatcaccctccagtaactgctctccatgcaacagatgagaaggaaaatattgaaatgttatggtgccagcgacctgatccaaagtttaatggtatctcacttcttgacctttttctaggatcttaattaattcaaatagactattatacatctcaatattatgtttgccaccctgcaattctgttaaatttcattcctatccttgttattccattgagtcataggaatgaatggccttgttaacattgtgtgtttaacttgagcataatttgttatccctgcaattctgttaaatttcatctcaaagtttaaatgtttaatgcataatttgttttctaattttttaaggtatataataataaatttatttgaatgtttaacttgagcaaaactaaaataaaatctttttattgtaaatgattggtgtaattaaaaaatttgtaccaatcatcttaaggtaaaaaaaattacatcaatcatttaccgtcaaattatttaatccatttttatttaagatttttttatctattaagatttatcacaacatcgtcttcttttaatccaagcttgtaggctaattatagctaataattaatgttaatcaagcttgtggttaaacctgctttctaccattaaaaaatgtgtaggaccaattcagacaggtatgaggcaagggttagtcaacagaacaggttttggctaatcactcttctttctattctctgtttatgcttgcagtttttatgttggagccagacttgttgagagtggcaaaacaactatagtcataaccttcattgtttgctatgctctcgcatctttcatttctggttatgttggtgtttttcctagataattttgagagctgagttcatcacactattctagcattgaacaattcatttaaaatacttttcaggtatttttttgctctctctatggcagctatagcaatgtcacaatctggcttcatgacccctgctgcaagtactacaaaaagttctgctgcttctgtatttgctattcttgatcataaatcaagaatagacccacgtgaatacaggtcagtatgcatggctgtcttcttgctgcttgatctaaaagcttaagttataatccaatggcctgagaaacatttttattgttagtacaacttcagattaatgttgtagtaactataagttataatcagtctgttgaactaatctacatgacaccattgaggaaaatattggctctgagcattgtttttgtgttattcctgcctgatcggtataccatgcagggatagagtagagtagtcctttattttattttttttatgtgaaacatgtgtattggacaattattctattataattcccattatagacattttattctagcaaaccagtgtgaccttgtttctattttgttgcatatggcattcaacttgcatatatttcatctagtacttgtggatatatgaatgtgctgcatgaatttctgttgaaatgataattctccctctctgttcctacccttccattgtgttcttattacatgggttgtgtgtttataggcaaatatgatccatgaaagcacataacagcaacccaagctttggagcacaagtaagactccttgtattctcttttgttcttgcatgaaatctgcataggaaggagcatagtctctgaagttggaacttgaggcagccttgaagaattctcttaaagaacaaaactaagaaaatgatatacttaggtactatctttgttgaccttaatgattattaagggtaatttctagttagacactaatatttgttaaattttatatataattatcggattggcttttcaaacttttcttggatattctggacttatgtcactgttagtaaggtaagattgtgggtttttttatacccgttaatttgtcttgtttttttagtacaaacttcactgtttcatcacacaacatttattcttgtgcattgattgaggcaatttataaatgtggtgcattgattcgttcaatatattctcctcattcatattgcagtggctttcttagtatctatccaaatctttactaattttcttactaattttctgtcatctatcccatgacaatctgttgctcaaagtttcttatatttgacatctgatatttgttcataatgataggttttctcttctcctattttctaatgattgattttctttgcccaaatgcacttgtactaccatttacttgagcgtgctacactaggttattgattacttataaactccattctttgtaaactagttccgagcataggttattgatgacttcataatgaaattgtcttgatttggcctggaattttctattatgttatagaatcctagttttgctgaaaagcacttttaaattcaatgaaaccattcacttgcagtcttttgcttaggtttagatatccatttcctcatctttcctttgtctctcctgccttcttgtttgtctgtttgggtgctaaaattcatgtatctgaatacaagacaatagagcaacttggttatgttgttgaatgtagcccacgagtaacataccgtgtctttgggttttgtttgtgtgtccagtcatctgagtacaacctagtttacttgcaaggtagaattgaaaacttcttaaatggcctggaagaattgttggtaagtgttcctcattctttcaatctccatgttcttagcctatttgcttccttgtgaactgcaattaagttaacatgacttgggttcttatttcttaagaggttataaacccaccctgctatttatgagagaggaggaaatggatgcaaatagtaaaatgcgagcaatttgtaatcaggagagtctgaaagctattctccctctcagatgacggcattaacattgttatagcccaaatctaaatagtttatcatttagatcacagacaatgggaaatccattgcctgttttaatgcttgttatgtagttgtctcaaattcaatgaaaaacaagaggttgggaaaaagagacagacaacacgaaagctgttattctatgaattatttttcatttctctttgtagcaaaattatctttctttgttgagttttcattgcaaagacaataagatgtcaaaagaacttgttccaaaaaggcttttttgtttctaactagattttttgattcccttgtctaaaatattatattgaaatgtatatacatttgctgaatgaagacttatgctttggacaaatattttgggattgcaggatggacttgatggtgattcctttgagaattacaaaagtgggttaatggcaaagctgctggagaaagacctttcactcacatgtgaaagcgatagattttggaaccaaattgttgaaaaaaggtattttatattttggggtctaaatggtagtggtagactatagttatttaagttgtcaattaatgttgaagtatcataaccagcagccacgtattcctacatggttcagctgccagatatctcatgttcacattttgttatttctggttactgctgaatctgacctgtttatggaccaatttctgccaagtgacactactacaaatttctatctaggtattaaatttctatgtcactaagtaaagttggttaccaaaataaatgtcctagagcaacagaaattaagctatttacttatggaggtcatgacatggtttgcctacttatattaacttttgtctcttccaacaccaatatttttcagattgtttaaggccaaacacagcattgttctggatatcatgaatatatcatattagatgatcaagattactatgcacagagtcagtcctaaaccctcctttaataatccgtctagctattatgatctatgttttttattacaacaagttttagtccatcataaacttttgtacactaaaagcattcttaatcaatcaattgcatttaaatgttaaaatttaaatatatatatatatatatatatatatatatatctcttttggggtctaaatgtctcatatttgtatgtttggttttttgttttttgtttttttttttaaaaaggatacaaagacggttttaggcaaaactgtctttgtatgtggacatacaaagacggttttgcctaaaaccgtctttgtatgttttgttttttgtttttttttttattttttaaaaaaaggatacaaagacggttttaggcaaaattgtctttgtatgtccacatacaaagacggttttgcttaaaaccgtctttgtatgttttgttttgtttttaatttttttattttttaagaaaagatacaaagacgattttaggtaaaactgtctttgtatgtgaacatacaaagacggtttttcctaaaaccgtctttgtatgttttgttttttgttttttttttttaaaaaggatacaaagacggttttaggcaaaactgtctttgtatctaattttttttaaaaaaataaataaaaatacaagaaacaaagacggtttttgaaataaccgtctttgtaacaccccatacaaagacggtttttgaaataaccgtctttgtttgtcctcgtaaaaaaaaaattgggatacgaagacggtttttagaaccgtcgtcgaaaggtccaacctacaacgacacgcgcataaatgacggttctagaaccgtcgtcgtatgtgttctagaaccgtcgtcgtttgttccgtgtgtagtagtgacggggccagtgctgtttcatgcaataaaatcaggaaatgttgaagttgtgaagacacttattgacatggatcgtatatcattagagatgtataatgaccctgaaaatagacggaacatgctgcacttggttgtggtatttcgacaaaaaataatatttaatagtataccatggggattaaaagagcatctagtacgagcagtggacaatgaaggtaacaacattctacacttggctgcgcatcttccaccagttgaattcgaagatttgtccagtttaagagcaagcattcaaatgcaaagagaggtcgcatggttcaaggtaaatgaatttgcttagtttttcttattcaaccattctttattcactcgcatgggagcgatcagttctagcaatcttattttaaaaattaaaaattccacaaattttaggcttttgttaactaggctgattttaaatctttaaaagtaacaagttttaattataaatagaaatcattgtatgtagtatttgtttattattgtaacatttttttaaaatttgttatccattgtctttatcataatagttaaacaggctatatatagatatacagaaaattttaactaaaaattatacaagtgcatttgtaacaacaaatatcacccgtaagatttatttttaaaatatcttaactttgaaattgtatttcttacaaatttaatatctaatagttattagagtaaattacaataattctcttcagtttcgtctcgtgtaattatatgtaattccattttttattttcctactttaactttttttaagtttgaaaaattatactaaaattttctatatgtttaaaaatattacacgaatatttcttcaaactttacgttaatatctcggaaaatatgtgtaattacattaaaactcgggagatgttattgtaatttgctttagttattaagtgataattgaaagattaattaagttatgcatttggataccatcatttacatatactcttgatttgtaagtagttcgtggagaggaatgttcctcgtgaactaagaacaatgagaaacaacatgggcaagagaccaattgatgtatttaatgatgaacacaaggagttatcccaagaaattaaggaaacagccaaaggaatagccgaatcaggcatgcttgtgtcaacacttgttgctaccgtagcatttgcggctgcactgactcttccaggtgataagaccaatgcctggtttactgtcttcatattgacaaatgcagtcgcattattcgcttcttctgcgtctttactctcattcttgtcaaatttcacttcatcaagattcgcacaaagcggctttgtgaaatcactacatcccagtttgacttttgggcgtgtgttacttattatctccgttgctgctatggttgtggctttcactgcagcctcctttttgatatttgatcacacttccaagtgggtttcttatgcagtggcttcaatggggcttttcccaatacttctgtttcttctctttcaatttaactttttcgacaaacatttgtggtctagatattatcgtttgtcctgactggactagcttattacagagttacagacattttggcataactttaagacactgtattattatttgtttgtggaacaattaagcttgtgtttaaatttgagattattctacattttctatgtcatgaaatattacctttctattgttcccgccttaatttgagactacactgcataacccacgtcaaagcttttccccttccttccatatggttggtgaagggagcaaatcataacacagaaaaagcttttttttattacacattcatctttcactgagacttaatcttactcgatctaacaagaattactatatacaacaaaattttaataaatataaaattaaaatgaagataaataaagtaatacaaaaatattcttgattgaatgtgttataaaatgagaaatgaaataatgattaatgagtcataaccaaaccatatttctcactaagagacgtgaaatggaagaagaaatggttagcaatgtttcttttacttatgtttaaattttaaaaaatcaaataattgttttataacaaaatatttttatgttaagaaataatgaaataaaaagttcagatttttcaaattaaatttgattttttatttgtatgaacatttttgcaatgatcatatttttgttttctactgtcttatttattcaaacaaattaaaacttatattttttcgttttatatctattcatctaaataataccaaactttacaaaatatctttaaccttatagaaagcatttaaaaaaatgataaacgaaaaaaaatacatacgaagacagtttttggtcaaaatcgtcttcgtatgtattttctttttttaaaaaaagggatcaacaaagatggcttgtacatacaaagacgatttttaataaaaatcgtcttcgtaggtgtataaaaaaatcgagaaacaaagacgtttttttatccaaaatcgtctttgtatgtatataaaaatcatttttgtatgtgtacatatacaaagacggttttggataaaaatcgtcttcgtaggtgtgtaaaaacaaacaggagaaacaaagacgatttttatccaaaatcatctttgtatgtgtacagacgaagacggtaagtgtgtaaaaaaaataggttaacaaatacggtttttacaaccgtcgtcgaaagtcatcattttcgatgatacgcgcaacaaagacggttctacaaccatcgtcgtaaggggttgagaaccgtcgttgtttacctccgttgtagtagtgaatgtttacaattccaacatcatttgatacaattaaccataattcaataacaaatttaatgagaatcagttgaaataataaattatgactattaggtttctgaaagactgtgatatataccatgcatcctttaaaaccaaacaggtgctaactatattctcattgatttcatatatatatatatatatatatatatataaaggagatatatatgaactcgtacgtggtttttcaatttagttggagttttaaatttttaattaccttgccttgtgctatttaatttgtgcatataacagatttggcaatgcgattatttgaaaaaacatccaactactctggccattgcaagaaatgaagataaccttacagcattgcatatgctggtgcaaaagcctccagaaattttaggtaagctttcacaagttgaaaatggctttttttgtgtgtgctcgtgtgtgcttgcgctaagctaaaatttagatcttatttgacatcattttcattttgattagaaagttatatatatatatatatatatatatatgtgtataaaaaaattaagaattagtccttaattatcaatatccagtgtaataatggtattagatgtttgttgagttattctaataacacaaattaatgtttgccaatacatgagtcacatgtgcaaaaatatcttacaatttttttcatgtacggattaaaatagataattttttaaatagctagagataaaaaatggtgcttcatatatataagaataaaaatttaataagttatgtttgtttcatttcatgttaaacattggttggaccaatcaactatatatatacctcttgcccgacattgatgaggacgacaagaaatcagacgctggtcagctatttgaaaaattattcactcaagttaaccaatagtcttttgtttcttatcaacatatcttttaggatatttttgacagtctcttacatgctttatcaaattagtgattccatatttagaactattagtcttatatgatttgcgacaatacttgcaaaaagcatcatcatttaccctatcaaaatgaacccaaaacactaggagttttggtagattttctttttagcacttttgcttgtgaagataagtttctcgcccttgttgtgtaggaacctttggcacttattctaatagtgatggagcttcagtgggtgtaggtttagtaggacattgagaaggagtaagcgatggcggaggacttaagaccttaacactttcagtacaatttctatttgtcatttgtctaatacaacctatgcaatataaaagaaaaatatcaacaacataatatactcaattttggtaagtctctcaattaaattaagaaagataatcattaaacaatatgtgaaacccaccaaaattaaaaattttcaataaattttaatcaattacagaaaaaatatctaaaagaaaaagtgtcatagcatttttcattattaggaattacaatgttagacgggtattatagtctatatttggttaaatagcttgattatttatgtactgagtaagattttgttaatttgttatagatatatttatatataagttgctctttaaataaaatataaatttaagtgagtctatttatatgttttttataagttattataaacaacctattggaataactgaaacataactttggacatatataagttttctaaaatatttaggagtatttgtgatttgatttagtttattttttttttacaaagatttaatttagcttttagatgaaaatgacgtgttagattctatcttaatatttattgacattaagtgaaatatatattgtaaagttgcttggcagatatataattatatcttaggaattgaggttggtatcatatgatagatttcaattaaaagttattattagtattaagtaaagttgcacaatatatatatatatatatatatatatatatatatatatgttgtacatcaaaaattgtagtagataatgtaaaatctttcaacattttgtaattaaaaaaaaaacaatttatgtttatatatatgacttttaattgtttttaatttaataacagacaaaataaagcgcatcatctaacaaccaatcaggtcattgtcaaagcttgaaaatgacatttacattatcataaacaataaaaaattatacgtaacaataaatgcattacaaacgttttaaacaaatatatattataaaccattcatagttgattagtcataaactttttatttaacacaagcaaaacatctaccatttttttaagatgaaacatctaccattcttaaaatcacatactattatgatcaaaaggcgaaagaacacatactatttatgaacaaaagtgcctataaaaaaaatatattatgaactaattaaataattatttagtttaagttaaagtcatagataaattcaaataagtctttaaaatgcatcttatttttatttttcttgcaaagagaattttcttacccttttcaagtaagcaacaaaaattaattttataattataagttaacacttcatttcttagataacttttgctttctcattttgtttataacaattgattattttaaatagaaaaaaccattacaaatagtttcatatatttttatagttttattattaaaatttattttaaaaattcaaataatataaattatctcaaaatcattttccatataatacatctaatcacaaaactaatttcatataatcaattattaaaacaatattttttaccacaactattctaaatacgttttatgattgatccatcaactcattactataagccttgtttctgaatctagtggttgatgattattctgacgcatttttattttctctggtgctactaatgtttaatatatatacctctttttgacattatctattttatgttgatcatgattatttgtaaagagcatgcatctaatatatctctttttcacatccataaaacgtgcaagctcatgaatccgcaacgtggtacgaaagaaacaaatatattttaaagagaaatacagttgttaaaaattgagaaaagaaaataggtgaaaactaagtaaaaagaaaaatatttaatttaagagaaataaaaattagagaggagagatctttgatttcgtttttttaattatctcttcacttatttttcttttatcaaatatactccatcattaattttttattccatatcatcctcattttcttgtttcttctgtctattatatctctgccaaacatagtgtaccagctttcacagtttcacaaccaactcataatggagacataatatcgtagttcacacttcacatccaaacacgtgcttaatttgttatagatatatttatatataagtttcttttaaaatcaaatataaatttaagttagtctatttatatgtttgttttataagttcttataaaaaaactattgaaataagtaaaacataactttggacaaacataagttttctaaaaaatttaggagtatttgtaatttgatttagtttagtttttttacagagatttaatttagcttttagatgaaaatgatgcgttagattctatcttaatatttattgacattaagtgaaatatattgtaaagttgctactagtgacggaaccatgaaataattttagcgtatgccaattatcaattttttaagtgtattaataaaataattatatataataaaaataattataagtgtattaataattttagtccatatcatgattattgttggtttaggaatgactccgctggttgctaagcatatatataagttatatcttaggaattgaggttggtatcatgcatatgttagatttaatttaaaagtaattagtattaagtaaagttgcgcaatatatattgtgtaccccaaaaattaattgtagtagacaatgtaaaatctttcaacattttgtaatttaaaaaaaaaatatttttatatgacttttaattatttttgatttaacaattaacaaaataaagcatcatctaacaaccaattaggtcaatgtcaactcttaaaaatgacatttacgttatcataataataaatgcattgcaaaagttttaaacaatatatattataattaaatcattcatagttgattagtcataaactttttatttaacacacgcataacatctaccattttttttttatagataaaacatctaccattcttaaaatcacatactattatgatcaaaaggcgaaagaatatatagttcgttttgtattcactacacatactattatgaacaaaagtgcctataaaaaaatattatatatgaacaaaagtttaaaatacttctatattatgaatataagcataataactgtgcagttaggttcaatttcaacaattagatgtaaaaaccaaaccaaagataatcaatagaaaatatgtaatttgtttttgcagtttattattattttaatcggtatgatgatttagaattatttagtttaacttaaagacatagataaacccaaataagttctttcaaatgtatcttattttttttttattgcaaggagaattttcttaccctattcaagtaagcaacaaaaattaaatttataattataagttaacacttcatttttttagataacttttgctttctcattttatttttaacaattgattattttaaatagaaacaaaccattacaaatagtttcatatatttttatagttttattattaaaatttattttaaaaaattcaaataaaataaattatctcaaaatcattttccatataataaatctaatcacaaaactaatttcatataataaattattaaaataatattttttccacaactattctaaatacattttatgatggatccatcaactcattactataagccttgtttctgaatctagtggttgatgattattctgacgcctttttattttttctggtgctactaatgtataatatacctctttttgacattatctattttatgttgatcatgattatttgtaaagagcatgcatctaatatatctatttttgacatccacaaaacgtgtatgttcacgaatcagcaacgtgatttttttttttttttttggcactcggattgtttggtacgtacgaaacaaatacatgaaatgagaaatacagttgataaaattggagaaaagaaaaatgtaataaataaaaataggtgaaaactaagtaaaaataaaaaatatttaatttaagagaaataaaaataggatgcacccggatcgttacggaagaaacaaataaattttaaagagaaatacaaattagagagggggagaagttactattcatttctagtcatctttgatttttttttttttaaattatctcttcacctatttctcttttatcaaatatactccatcattttttattccacatcatcctcattttcttgtttcttctactattatatctctgccaaacatagtgtaccagctttcccagtttcacacccaactcataatggagacataatatcgtagttcacacttcacatccaaacacgtgcttaaatcatgggtgagttgtgtccacaaataaccaaaaatatcaaagttgaagttaattagttatctacagcttattcttctacagtaattcatggaaacacccacgagaatacttacggagaatgagatttttttattaatagaaatcaaaacagtattaataaatttataataattcatatatgttatcaatcaattaaactagacatattgacaaagggaatatctgagattggtcacacatttgcaaatgcaatagttaaaaaatgttttttgtttaaaataaaaaacataaaaaagtacatgaagaattgttataaatagtaattaaatatacactcagtagcggagatcaaggctagcataacagtttttaacatattcatgtcaaaataataataataataattattattattagaatttattaaatgctccaaatcataaataaattcattaaataagatgtaagataaaaaaactttcatctttcattctctggatctttttttgtttaccactcaaagtcaatcagaatgagataagataaactttgatattttgcctataaaaagccttagaatagagtacagtcatggtgtacagaagataaagaaaagagaaatggcaacagaaacaaaacagccagcattaggtgacatcaccgatgtgcctggagcttccaacagcctcgagatcgtcgatctcgctcgctttgctgtagaggaacaaaacaaaagagaggttctttctatatttttgttttctttcttttcttcatttaagtcaacttcacaacttaagaattaggattatctttttattttattttagaagttataagattaacttagtaattattaaaaaaaaaaagagattctgaatttgaatctaacaaaaactaataaaactcgttgaagttcacgttattctgcacatgaatctctacaaggggatcacataggttatgctacatttcggttgctttgatgacaaaaatgtttaataaccaatgtcagcaggtagggatggcgctgcatctgcatggagttcttttgtttctattgttgtactgtttctttcgtttggtatcattgatacctatcacttattaatatatatatcttactaacttatgctaatttttaacacaaacttttattaagtgggatattaaaataccatttctgattagagaacattaaaaatacttaataacaaaattatttctcagttttatctagttttaaatgcatttctccttttattattattattattattattatttgtgatgatttaattaattggagatggaaacgcatgcatgcagaattcagttctggagttagtgagggtgattagtgcaaagcagcaagtggtttctggaatgaattactacataacattggaggcaaaagatggtgagattaaaaaggagtatgaagcgaaggtttgggtgaggaattggttgaactccaaagagttgctagaattcaatcctaaaccaatatttggtgcctttacccatattgtgcctcctcatagcgacgaggtcgacaatctcgctcgttttgctgttgaccaacacaacaaagaaaaggttctttcttttcttcctttaagtttcaactttacaacttaagaattaattaacatcttaatatgcatgtttaatttagtttatttctatttttaattgcatgccattagttttctcttcttcttcttttttttttttttacttgtgctgattatattggagttggaaatgcagaatgcaaatctggagtttgtgaaggtgattagtgcaaagcagcaggtggtggaagggttcatattctacatcgctttggaagcaaaaaattgtgaaaccaaaaatgtgtatgaaacgaaggtgttggtgaggccattgttgaaccccaaggacgtcctcgaattcaagcccatcagtgttaatcctctttcggtgtcggtctagccttaataaggcatatttttaatctctgagctctcgataaatattaattagtattagtttccatatttttattttgatcaaattaatctttaaaccttagaaaaataatactggtttcatcattatttttattctgaggaggaacaaattattgctttttttttaattcaagaattaaattaattaagactaaaatttgagaactaatatcaagttttattaaaaaatatatggaccgaaaagataatttatccctttactaaactaccatgaccaaatattttgggcattcatatccatggtgtcgttatctgttgggattattaaatgtgtcttgtctttcatgtttttttcaggttacagaagattataaatgtggtggcaaggtgaaagttttagtatatatatcaagactatatatatatatatatatgtatgtatgtatgtattgcatattccttcgaaggtaatgtaagagaaataaattgtagtgtattttacactaaaatttatttcttataaaaaaatctaaggtagtattaaatatgcatgttatatgtatgtattgtatggaataaatgcagctacactgtataatggtacatacggtgtagggctgtacaaatttggcatcctatttcaatattaacgactactaataaatgttaccattggagttattacgtattgattattttgtatttacgcgtaaatagctaaatgtttccaattgatgcactaagtgatgcaaacaaatgttccttcgtttatttttttaggacaagatgaaaaaaaaaacatttgatttatcaaatatacaatcaatcaaattatcgattactcttttgatttaagagataaaaaattaggaatttttggacttttttttttatttactgaaagaaacaagagcacaattgaatgtactagaaaaatcaattaataaaaatggttagttgttgaaattcccttgattccatcctaagataatctctttctcgtcttaatatgtgattcaatttctcttagttagctaaactacaattctttggacgataaaccattttttgctaatgataagctctaatcccctcatgtcagcaaattaaagaaaggcatggaaaattcacacaagtgcatacaatcatcagaaaaatgattttttttaagaaacggggagcaaaagtctagctaatgggattcatatatctcaattctgttgacactttaatcttattaacactatatcgttcactctaaaatatcattgatgaaaagatgaacaaaacacttggaaggatcaaaccatactccatcaacatcataaaagtgatttattaagagggtgttgtttgaattaaattgattttgatggtgtaatatgatcaaaacggatttgaatgtctatatacactaattttctattacaattagttattttgatataatatatatatatatatgtatatatatatatatataattaaacccaaatgtgccaatagttaaactgaaatataatatttccttttactaaatgatttatcagactattatgttatgagtacaaggaataattagataaaatacattcaataaaaaacataacaactagaatctataaatattgcaagaattttaattatgtttttaaatcaataaaaaaaaaacaaacatatgcgtatgagagtattgatgtgaaagtaaattagacaaattctaactagaatttattttgaaagaagtagaagttattcctactttaattccacccaccatatttttttcaattaaaattgattatactaaaataactaaacatgtaaaatctactatctattatgttatactatttattcttatttataagactcaattatctaatccattaaaattaaaaaataattaactaagttgatagtaaaaaaattgttctaaaataatatgttttcaaaaatactattgtcattaatgtttctctctcttctaaatatatatgctaatataatttctctcttatttaattaggaatatttttatagtctaaaaataattgatgcatgggataatatggattataatttaattaacactaatatgtttttgtaataattatggtaattttttattatcgtggttttattaaattgtcataaatattttttataatgataataaaaatgttaacttaaatactaacatattaataataatatattatattaattaaaatataataattaaatacataaaaaattataaattgtaaaattactacaggtggagtcatgagccatttaactagttttagataaaattaaatttgattcatctcaccatatttcatgataattttaaagccaaaatccaaacacactataattaatctatgttatcttttccgtaaactacacatacaccatgtcaaagtctttttctttccatgtggtttataatttaggatttaggattcttattatccatgatttaaatcctaaatcttaaaccttatatatatagttacatcttgcatatatgagggacaatttagtatgaaacaaggtgtcaagtgtcaacaactaattcaaagcaagatttgaaatattttgagtaaaatatatgtttagactctatactttgttgaatattatttttagtattaaatctttcataatatacattttaatccgtaatctgtcaaagactagcgtgggagaatataacatgtcttccacaatgggaaagtgaatttccaccattagagttattaaattttaatcccatggatgagtttttttcttcttttttctttataatcttttccttttcttcttgatctcccgatttatccctctggctttattcatcaccattgctgatttcttccttttcttccatttttcttgtatccgacaacgacacctacgcagaaagtaattttcggcaacccctccctttcctcctttttccctattccacatccacagatggtcactacggtggtcgagccacagagaaaacaaggccaggttacaaatattacatatcaacagtacaataatttccttgaaactgcaatttcaaatataatcacaaatcgttatataaaatgtcatgattttcaaaaccaaaatctaggtcttttattcttccaaattggactcaaaattgagagtaaaatggtatagaaacaacgcttatgcaagaaacaaactcgtaacttggcacccatgagaaaaaatcaacacgtacacaaaaaatatcaaaaagctcaaaactttgggagactaaaatctgggtttgttcaaatgaatccaatttgggtttaagtgaggcaataattatatcaagctttgtgactgtttcgtcttccatgctttttctcctgttgaaatcttgtggcagaacaccgcaagaaaaacggcgaaagaccctctcgagttctctctagtttactccgcacaacggtcaggcaacgacgcatcaacatccccactatcatcggacgtcatggcaccaccgttgccgcttagatgaagagaggaagaatgggaaagaagagaagcagaaagaggaaaagggtagtacgggaaagaggaggacaaaaaaggaaaaataataataaaagaagaaaaatttacggtcattgatttttaaacaaggtaatctgatggtcataaaatactttctgaccgtaagagacccattacactctcgagacctcgaccacagtgccaccttttttaaaaatatttaccaaaacgacatgcgggcaaaactatttgccagaatgccacgcgacataattcgctatgcaccacagcgaactatgcttgctgatgtggcacactctgggtggctgcatagttcgctatgaaccccagcgaactaggtggctgccccacgggcagtccacatggcgcttaaacatagttcgctggccccccaagcgaactacgtggactggaattcaaaaaaagtgacggttactgttacgtgtcagcgccttacatagttcgatactaccattagcgaactacgtgttgcgaattcaaaaaattggccgttacggccacgtgtcagcatctggagtagttcgctaccatgcctagcgaactacgtccacgtggaccacaatttaaaccccaccccctgccggtcccctcttccattctctccctccttcgaaaattttaaaaaattttgaaacttcttctctcttctctcacattgtgcaaaataacaagtaagttgtgttgattttaatttttttttgtatatttaattgatattatagttgttatataatatataggttgtaaattagcaacattaggttagaggacttttatgtttgatatgaacattgttaatttatagggtaaatgattatgtgagactctagggtagaagaccaatagtttgattaggttctaaaatagcaacgttagattatataacatgttgaaactctagggtagaagaccaatagtttgatatgaacattgataatagggtaaataattatgtgagtttttcattgtgtggatgttaaatgtaatttacattttgaattaatcgttaataaacatgatttatttcattatgtgaggattcattcttttaaaaaatcattttgaatatatatttagatttaattaatttgatttagtgatgctcaattcgaagtaatttattaaatttgtaattgtatatatcctattttgtatttttcatcatgtgaaatatgtaaaacaccaaaaaagaataattataattatagttaaacatggtaatgtaagtaaaataatgaattatgtaaatatatttaattaaatatttaaacataaatgtatgtatactaatttttatttattaacaatttaggtaaattaagtaatatataagagcgtatgatttttttagttatttagtctttaatattgatataatttatgaaattaaattgactacaaagaatatatacgattaagaattgaacatatttaggtaatttaaaataataatattttgatgttttttaaataaaaaatttaataatattacaaataattattttgaatgagttgatgtagaaaaaaaatatttattaccgtattatagtttgttattatttaacaacgtaatcaagtgattaaatgaatataggattagacatagagaaatatggatcgcgatgagagtgtcccggcaccgccagcgggtgaggatgcgttgggcgtcattgatgagcaggttgacgaccccgaccgactagttaggcgtaatccggtcaggggagcacgacatcgatgtcatctgtcaccttatgagcatgacatgactcgatgtgctgcatatcatggggaccatcatgatgcctagtgacatttatttattacgtggactatgttatttatttagtttcgacgtttgtttttttatattttgtaacttttaatattttgtgcgtttgtttttaatattttgtgggtttatatttgcgcgacttctttaaatagcaaaccttcgtacacgttaattaattatacatacttatttgtacacgttaattaaattatacatactaaaatgcttataactgctgctgcaatcgtgtaggacagttccgtttgttgtgaccaaccaccttataatagccgcatcttaatcgtgtggttgatccttctcgcgaatccatctcgttgcgtatgcgtgttgtcacatgccttccttttgtgcgtctcagtaaaacatcaggcaaaacggtgggttgtctagaaggtggtacgaagtcttcgtttccaattggataccactgagacgaatatacttcatattgataacgaacactgtacacagggtgaatgtactgagtggggtcgatgtgcatggacctgcatgctgccaccacatgactgcaaggaaatttgaatgcactgaactcaccatattgacatacgcgttctgctaacgacaacgaccatttctttccgccacgttgagtgcgaatgttgaacgactcctgcacctcaaatctatcgtggtttgtgtcgtaagcaacaacactgtgtgttgcggatttatgaaccatcctcagatatttttgccacgctaattttgcaaaatgattacctctggccatctcttcaagggcctcacccccatgttgcaaaaaatatgtcactagctgagcgtatgtaaaccgcacaagcgaagtaataggaagatttcttgcgcctttaagaaccttgttaaaaacctctgacatattggttgtcatgtgaccaaatcttcatccatcaacatcataagctacggaccacttctccttcgggattcgatcaatccatgcggctatctgaggacttgcttctcgaaatttctccaatccgacatcaaaatctaaacgcgaggttgtataacctacataaacaaataacacatacatatgacgacaaacttaattatgcataatgtacatgtaaccataaaacgacaacagcgatggcttacctaacattttcaactgcttttttaagatgacatacttgagcttgtgattgaaattgctcgctaaatgacaaatgcaaaacacatgatacaccctcgggggatgccaaccaagctcgacattgttcaccgccgaaattatgcccgcatggcgatccgaaatcagacatattccatttttttgcgtaacatgaatacggataagtgccaaaaaccatgaccagttgtcaatatcctccctagagaccaccgcaaatgctagtggaaggacataattgttaccgtcaattgatgttgcaataagcagtgttccctgatatttcccgtacaaatgggtaccgtcgatgctgataacgggcttgcagtaattaaaagcatcactacactgcttaaatgaccaaaacaccctcttaaataccctacgactttcatccagttgtccatcgacataatgctctgttgtttccaacttaaaagcagacccctgagcaaaatttaacatataactcaaccactttggcaggaatgcatacgattcatcccaatccccaaacaccttaacaatggctttctgctttgccttccatgccttcctatatgatatatgaaatcctagcgttgttgaaatcctttcctgaattaagctgattttaacactagggtcctccctaatcatttctgcaaaatgtgacataataacatgttcgtaaatctgtttgcctaaacataaaaattattgtataacaattataaagtacctatgatcaacgaacatatgaaatttgagtctagctgcttgtgatcctgagacagattaacactaacgcacgtgtgctcattgttccatatgcctacaacccattcactggaagcctttttttggtatgccctcatcctccatggacaaccgtcattatgatattcacaaacaataacggttgtccgatgctcagccatacaatattgttttattgccatttgcacatcaaacttgctctcaaacaactgccccttgtatagcgcttggcccatctcccagttaggtacttgcactccttccatgtcatctgcctcatcatctgggggtgaccaattaatatttgtgtaatggcctacgttagaccaaaatggcacactgccctctcctgtacaatcatacatttaccacattgttatgcttaatctacaaatattaacgccaacaatattaagtaacacacaattatgcgcccatacctgaaatcggaggcaaattttgcattccaacaacccctggagaagggatttcaaaagcatgatcaaaatcaccgtctacgtccgtatccgatgagtcactatctggaacaacaccttcatcaacctcttcctcagaactatccacgggccaagctgggttgtgggttggcaccatttctgtatcttcaaaatcaatttcctgggatggttgggttggtggtggtggtggtggttgtggtgatggggatatatttctttcttccgaattgaccatcggcactaagttaaggtcaattgaccccatgtttgtagcaaattgttgactgcttgactgtccaccggaatatacttccgcatacaattctataaatctgggattttctccatcggatctgcatgcatcagtaactaagattacatcttcgtcatctacaatatccacaccgacccactgcaccgagttgccagatgcacatcgcgcactaagtcgagatacggagtgtccccgttgtaagcgtaacttcttgtatatcattctcatcaaatgatcatagctgcatgctggcggaatacggaacattttgctttctccttcgaacacttgaccatttggtccgacgtatctcctcccattgtaatatacaatggtgattaaacccttctctctcccactcatgttttcaaattcgagcctataccaaagaaaaatattctcaagaggaaaacgttctcggaacaacatgcaaactggagggggcgtgctgtcattaaataggtgggtgccacagaccaagctcgctaggccctgtagcgagctccgacttcgctactctgacaagcgaagtatgtatgtgccacgtgtcaagcttttacctagttcgctacaaggtccagcgaactccgcgctgtctgccacgtgtcatgcccggtctgccagggcactgcgccattgctcagagtgtgccacatcagcaagcatagttcgctggggtgcatagcgaactatgtcgcgtggcattctggcaaatagttttgcccgcgtgtcgttttggtaaatatttttaaaaaatgtggcactgtggtcgaggactcttacactctcccattatagcttgcgtcttcctaaatttacggtcattgatttctggttgttgtagtgagtttaataaaattcatacatttttcgataataaaatgcatctagtcttgctttgaattcaatggttattggagtagttgactataactagtataaatgcgtcaacggaagttagataaatatataataaatatacaacaaccgctatcatatcattgtacaacgaagaaagataatattaaattgagagtaagttaattaacagtgtcatgatagctgagtctcgctaatccccacaatttaatgaatataattttttttataatggatatattttttactgttaacaaatttaatgaatatatttatttactttaaaaaagaattaatattataaatttagaaatcattcaacttaaaaagcttttgaaaactgtagggttgaggtgttgaacagattgaacattgctgtaatccacaaaatgtcatataggaaataattattttacgtgtaagttggaaaactaattaagggctattgttttaccaccatatataatatgttcaagcttcgcaggctggaaagaaagaagcaacacttatagaacagggaatttcagagaggtctccaaatcacttcatttccctagaattaaatcatgaactccaatatcgaagtttcagctgaccacataattcagattaatcaaagtcatgagcaaactccaattgccacttcaacaaactcgccggcaccaaaacatgaaagtagaggagtgaatgaaatgactccagaagagctgagtaagttatacttgaaactattgcattcacaagagggtgcatttcagagatcatgtcttaagagtttgtttattttacattttgaaaaaaattgaatttgaaaccacttgacgttaacaaattatatttatattattattatacgaatgatatttcaacaatgggtttagaaaattattttttttattcgaaagataaaaaaagtagaatcacttttaaagtgagtataaataagtcacatgttaagatcaattagcttttgtcaactgaagaaaataaaaaataaattacttctctcaaaatcaattttacttatcgtcatagaattaattttcaaacttaattaaaggtgattgatgattggatcccttcgactactacataatctcaaatttctcaggtaaatttcaatttataaatgatgaaattattaagaattcaaaatttgagacaagtttccaagagaatttttacagatttagggtaaacgataaattaaaatggtcttctttgcaactaaatacaaaaagttatgattattaaataaaggacatgttataatgtgaagtttgaaaggattgcaggatctttaaaagaagatctgaggatacatatattgcgggatgagtggctggaatcaaaatggattattgagaaatgtcctgatatggtacgcattccgttaaatgatagtgaagacacagctcttcatctagcagtatattacgaaaggcttgaaattgtgaaagagttggttaaccgtatgagggcagaagacatgcgaatacaaaactcaagtggagacacagctcttcatctagcaccaaggaaatacaaccttcaaattgtgaaagagttggttaaccgtatgagcccaaaagacatgctaatacgaaactcaagtggagacacagctcttcatctagcagtatattacgtaaggcttgaaattgtgaaagagttggttaacggtatgagggcagaagacatgcgaatacaaaactcaagtggagacacagctcttcatctagcagcaagggaatccaacaatgatattgtgaatgagttggttaagcgtatgaggccagaagacacgctaatactaaactcaagtggagacacagctcttcatctagcagtaaggagaggcagtcttgaaatagtggacattttgtcctctcagaaagtgcttgagaaaatggatttcaaggatattgaactactgtttttcatgaccattaggttcgacatgtttggtaagtgtaaaactaattaaacaaccttatttctcctttttgtaatctagttctcttttacatattatgaagttttacaaattgaatcgaacccattaaaccgatcagataccatatatataaatataatgtttacaattccaacgtcattcgatacacttgaccataattcaataacaaatttaatgagaatcagttgaaataattaattatgaatattaggtttatgaaagactgtgataccatcctttaaaaccaaacagctcctagctaaattctcattgatttcatatatatgaaaggagatatatatgaactcgtaagtggtttttcaatttagttggagttttaatttaccttgccttatactatttaatttgtgcatataacagattcggcgttgcgattatttgaaaaacatccaactactctggccattgcaagaaatgaagaggacattacagcagtgaagatgctgggggaaaagcctagaggaaagtcaggtaacctttcacaagttgaaaatggcttttttattttttttgtgttctaagctaaaatttagatcttatttgacatcatttccattttgattttagaaagttatatatatttttgttttatataaaaaattaagaattagtccttaattatctatatccagtgtaataatggtatttgatgtttgttgagttattctaataacacaaattaatgtttgccaaggaatcagaagtttgtgatcggctatttggagaagtattgactcaagttgaaacattggaacagaatcgtgaatatgcaataaaatcaggagatgttgagactgtgaagatgcttcttggcaataatcttagattagtgacttatagggaccgcagaaatgaatggaacctactgcacttggttgtgctatttcgacaaaaaggcatatttaatattataccaccggaattaaaagagcttctaggacgagcagtggactatggaggtaacaacattctacacttggttgcgcgtcttccacaaggtgaattcgaagaattgtccagtttaagagcaagcattcaaatgcaaacagatatcacatggttcaaggtcaattagtttgcttagtttaatttctttattcaaccattctttattcactcgcatgggatccatcagttctagcaatcttattttaaaaatttaaaattccaatgttaactagactgattttaaatctttaaaagtaacaagttttaattaaaaatataaatcattgtatgtagtatttgttgattattgtaataattttttaaaatttgttatccattgtctttagcataatagttaaacagccaatatataatagaaaattttaattaaaaataatacaagtgcatttgtaaaaataaatatcacccctaagatttagtttttaaaatatcttaactttgaaattgtattttttacaaatttaataagtaatagctatttgaggaaattacaataattttcctgagatttcatataattatatgtaattccattttttatttttctacactaatttcatttaaatttgaaaaattacactaacatctcttaatatgtttaaaaatattacaataacatccccttaaaactctaatatctcaaaaaatatttgtgtgattactctaaatcttagaaggtgtggttgtaatttgctctagttattaactgataattgaaagattaattaagttatgcatttggataccatcatttacatatactcttgatttgtaaatagttagtgaagcggaattttcctgatgatgaactaagaacaatgagaaacaaggcgggcatgagaccaattgatgtattttataaggaacacaagaagttatctgaagaaattaaggaaacagccaaaggaatagccgaatctggcatgcttgtgtcaacacttgttgctaccgtagcatttgcggctgctctcactgttccaggtgataagaccaatgcctggtttactgtcttcatattggcaaatgcagtcgcattattcacttcttttgcgtctgtactctcattcttgtcaattttcacttcatcaagattcgcacaaagcgaatttgtgaaatcactacatcccagcttgacttttgggcgttggttacttatggtcgccgttcctgctttggttgtggctttcattgcagcctccattttgatatttgaacacacttccaagtgggtttcttatgtagtggcttcaatgggggttttcccaatacttttgtttcttttctttcaaattagctttttcgacgaactctggtggtctagattttatggttttgaaaaactggactgacttattacagagttacagacattggcataacttcaagacactgtattgttatttgtttgtggaacaatgaagcttgtgtttaaatttgagattattctacattttctatctcatgaaatattacctttcttattgttcccgccttaatttgagactatactgcataacccacgtcaaagcttttccccttccttccatgtggttggtgaagggagcaaatcataacacagaaaaagctttttttattacaaattcatctttcactgagacttaatcctagcggcctactccatttgaaaagaattactatatacaacaaaattataatgaatataaaattaaaatgaagagaaatgaagtaataaaaaatattgttgattgaatgtgttagaaaatgagaaatgaaattataattaatgagtcctaaccaaaccatattttttagcaagtgacgtgaaatggaaggagaaatggttagcagtgttcttttacttatgtttaaatttttaaaaataaaattattgttttataacaaaatatttttatgttgagaaataaccaaataattaaaaagttcaggttttcaaattaaattttattttttatttgtatgaacattttttgcaataaccatgtttttgttttctactctcttatttattcaaacaaataaaaatttatatattttgttttttttatttttattcatttaaataatacatctttttcatcttattttatatttatttttagataaaagttatgtatggagagtgtaaaaagatttatatagtcatccaatcacaactcataatgtatatataataaatttgttaatttttaaaataataatttatgattaaatgataatttctaaaatcttgaaattgttttatactgttaagctgttagtacatagtcattaaactttaatttctatctctcttaattcttttccatttatctgatttctcatcaaattcaagataacaaagaaggttcaagtgcaaatcatgtcgtcggatcagtgagttaatttgctccgcagatttgctctcaaattgtactcgagaggaaacgtcgtgtgatacaataacagacttgcatacacaacgccacaatcaaagctaacaacccaaacaaaatcaaaatcgtaagtttaaggatctgaatgtagtgcctaccataggcaagacctatatgagattaaaatttctcaaataacaataccgtggctatttctaattggaacaatctatatctccacttttatcctaaaacaaagattgtaaggactaaagttttcaatgtcctatccctcctaatcttcctaacactaaggatttgtctaatactactcctaaaaattctactctaattctcaattagaactttctaaaccaaaacaggttcatctacatttcttcatcataatcctcttcatcttcatcaatccttccatttaagttaattagctagttgcatggaatcaatgttcattttttccatatcagacaatgaccattcagggtattcctcatgcttctcttctgacattgatacccccttcctctgccactgcaatgccaggctctgtccaaatcatgaagaagaagaaaatcattattcagataatatttaacatcaagctgctgcgaggttctttagaatgttgcatctctcagctagaatttccacattatgtgttagttctgattctatagtgaatagtttgctcaattacaacaacagttttcaccaaaagttttaagaaaaccagatagttttggttctttgtatagtaaggtttacagactattaaatgtacttgtaatcgcaagtcagtgaagcaacttgtgaatttcccgaatgactgaagtaaattcttttgtaaccagcaaaagcttcacagtctgcatgacatgagataattactaagccgaaggtttagtcacaaaagaaaaatttaagccaactcagtctgaattgatatattaccttgttatttctcttgggatcgtcgtggctgtcattatcatcatctttcttaatataaaataaataaacaaaattcaccacacagaaaacatgttcctagtaacatgagtattaatcagagcacaaacctcttagtgacagtatgatcatcaccagttacaacagaaccacctaaatcagaaacccttctgacaatatcttttagaaaatcaaagacattaaaagtctgcactcactgttttctgcaaaggcaaggatgcaagtaactcagacattttagaaactagaaagtgaaggtaaacactagaacaaacaacacatgttccaaaaccaagaccatcccaacatttaattttcttctgtagatgtcatttacacgtctaatcatgggttttatcaccgaaagtggttaattttttttgttattatcatttgggaggtatattttaaattttttatcacaaagagatatgttgtaagttgtaacacagattacgacttatatgttttttaatttttttttagactgaagtcataaaaaattatacgacttcaatataattttttttaacatataactttaaagtcgtaaaaaaaatttacgtgtaacttttttttacagttttttttaattacgacttcaaaatcataattttttttactattttaaagtcgtgatttttctttctttacattttttttgttttatttcttcattttttactttttatactttttttctttttttaaatgataatttaaatatatatatatatatatatataaataactttttaatctaattatttaaaaaaaaaccctaggtaataacaaaaaacaattacctccttccggtgataaagccttaatcatgtttgtgcatgtgaaacatagaagtcaaaagagggaaatttaatgagactgagcacattatcattaaaattgcagatccaatcgttctaggctgataccaaactcagatgggatgcttccagttcgcttggctgttttatatggacacaacaaaatggtgcaaattttgtcctcttagaatctgcttcacaaaatggtttataaggatattcaacgactttttttatgaccattagcagcaacatgtttggtaagtgtaaaatcaaacatcctttgttttatctagttgaactcgtacgtggtttttcaattttaaccttgccttgtacatatgcaatccaccatttcgatatatagtggattggtccaacaaatgtataacatgagcataaagaaacaagtaagattaaagtttggtcttatatgaaacatcaattttttcatattccaagtgggttttttatgcagtggcttcaatggaggtttttccaatacttctgtttcttctctttccatttaacttttttgacaaacacttgtggtctagattttatcttccatccgaacacttgccagtgtctattacatagttatagacaccggcaaactcaaacttcaagtatatgtcacaaccacttattatgttaagaacatttagatcgacattttaataagaaattatagttattccaaactttgagattgatccccgactattctatgtttcctaggacttatccatattaaatataaacttcctttatctccaatcagggacggaggcatgtaagcatgtgtatctagagctagtatcatgttaactgtactttggaattttagtttcaagtctttcttattagtattccaagtaaattcaaaaccataaaaacattttttatgttccaccttagataacgttcacctcatggtaggcacaagtcccacattggatagttaattattcaaatcattctttataattgtctgatatgtgtctttttagccaactcacgctcataactcaagtgatgttcttttgttaaatttgtttaaatttatttgttgaaaaaatatttattttaataaaataaacaattttctgtttttgaatgtatttgtttaaattgtaacagctttttttgtttattttgatcaacgttatttgtttaactgcttattcaaaaaatatttattttaaaattacttattttaagtttaaacaaactagtttgaggcgagattggttttacaaagaagcgattagtggtgcttatatattaaaaatcaaataagtatattatataataaaaaataataatcttattagaaaaataatggaaataattttaaaaaaatgtataattttttcaaacaattcatctgtttgtattttctctttcattgtccaaaacaaacataaataatgaatttctacacttatttcctttctatttttattcatctaaattacaaatcttttttactttatttcgtatttatttctatccgtctaacgtcttattcttttcctcttgtctcatcgtgcaataagttcacgataacaaaaattcaaaaggttgcatgcaaatcatgttgccggagcagtgagttagttccgctagatacaagtgtgattaagataggcatccccgtaaaattttgagccataacacacccaaaatctgaatgtagtgcctaccataagcaatacctacatgagattaaaatatctcataagtcataactatactggcaaatcgctatttctaattggaacaatctatatctccacttttaacctaaagcaatatccctcctaatcttcctaaactagtgaggagtaagtatctaacactgctgctacaaaatctactctaattccccataagaacattctaatgaccggcctatatgagaagtaatgaataaaccaacacaggttcatctacatttcttcatcataatcctcttcatcttcatcaatccttccatttatgttggctagttgaatgggatcaatggtcattttttccatttcagacaaggaccatccagggtattcctcatgcttctcttctgacactgattttgcagatgaactagttgggacagaagttggtgtgtctaatgaatccatatcctcatctgggttcaaatttaagtcaaaatttcgaatggacacttcagccggtttgcttactggaaaactctgcttaacttcttcaggttcgggcacactttccatgctttcattgctttgagtgtggttgtcattctgcttcaatacatcagaatcatcttcacacttggcatgtgaactcatcttttgatctacagttctaattccacggccacaacccctacctctgtccctaccccttcctctgccactcttatgtccaggctctggctgtgcaaatcatgaaaaaaaaaaaaaaaaaaaaagttccataagtcagataatatttaatattaaacagctgccaagttctttagtgccaattctatagttttcagcaaaagttttcagaaaaccagacagttttggcgctttgtgtagtaagctttaagttgaagtgtggcctagcctcacagactattagacatttagacaaacgtgcattcacaagccactagtgagtttccctattgaccgaagtaaatttttttgtatccagcaaaaggttcacaatgtgcatggagaagagataattactcagcaaaaggtttaatcacacaagaaaaatttaagctaaccactgttgaagtaattgaatacagttgataaattaccttcttttttctcgagctcctcgtcgctgtcattttcatcatctccggcaactttcctaatataaagtaaacaaagttcagcatactgaaaacttgttccaagtaacaagagtattaaccagagcacaaacctcctcttagtgacagcatggtcatccccagttgcaacagaacagcctaaatcaggaactttgctgacaatatctttcagaaaatcaaagatataaaagtctgcacacactgttttctgcaaaggcaaggacgcaagtaactcggacattttagaaactggaaagtgaaggtaaatactagaacaaacagcacatgttccaaaagcaagaccatcccaacatttgcttctgcagatgtcatttacatgtctaatcatgtttgtgcatgtgataaatagaaggcacaagagggaaattgttttgagactgatcacatcatctttagaattgcagatctgatgttcttataagtacatagtaataaccgccctccaaaagaaagaaacctgcagccttgtaaccaccttgaacagacttgacatagacaaaaatttgaacaaagaaaataatagaaacttcacttacaaatgaaaagcattcatagtctttgcccccctcctcaaagttatctcatatgttcgatcacacaaatcttgcagaaataactctagtgctttagctgcaatacataaacacaaataatcataaatcagagataattcatagaaactcccaaaagcacaataaaaaataaaaaaataaatcatttttcaagagaagaaggaaaacaccctagaatatgcatgaaagataaagattacttacaaactagaagaggcacagccattgcaatcttccctacatcctcgtcagcttgcataattttcttaatcctagcgtgccaataatcaattcaataagattacacaatcattactaaaatgtctaaaactaaaattcaggttatgacactttataagtttttattttattttattatttatatgtttatgaaccaaaaattgtctatccctatgcctatcaagtaacttgcccctttattttattcattggcaaagaggttgagtgaggatcaatgaggacgaagttaaaaaataagatgagatggagcaatgaaagagagtgggataaaaagagtgtatttgagggtgtgatgactctatcaatggaatgaacctttggtgaagtgccatgctgccttaaaaatcaattatgagactatctctacggatatgttattatagttccaaccaaacaaaaatgaaatacatacttcaacaaataaagttccctcgcgaggacttggcgcccaagcagtgaaggacctcttttttcattaatttccagagaggaatttagatcgaataaagcgataaacacaggaatgcatcatccaatttaataagacaggtcactaatcatatgttgtaactgtcaatagaaattcgggtataaaatttctatatggtacaaccttaaatcgcaaatagttttatccatatccgtattggatgacaccctatcttttctgaggctgtttcttttcgtgagttcacatgataaaaacatatatacagacaatatcacaattagaaatattaaagatattaatttaatgtggttgatcacctttttatatttttacgttaacatctcaccaaatattcaatattacaaataagattataagatttctttaatttctttttacttcttttaatagcaattagtggatttaatagtagttagtagttttaaataaactataaataagttattccaaagttatatttttttcttttagtataaaaaattaaaaatatattatgattgtaagttaacactctttttatatgtttttaattctttaacatttttcctgttgtgaattttagtcttttaacttttttcatatttagtttcagttccttaaaaggatctaaaatacggatgaaaaaatttaaagaactaaaaataaggatgagaaaaaaattaagagattaaaaatataaataaaaaattcaaagactaaaaagataaatttaaaaatttagaaactaaaaaatagcttatcttttttattttataacgatgacaacatgcatatttattgaatatcaagagaagtacatttacattaattaacatcaaacaaattgtgtaatctatatttctacggttctactaactttatttccatcacgtttagttctatggaaattaaattgaaggctttactctgaactgtgatgttttctaacactagtcctactgtgggcaatgtggacttcacgtaaagtgatttaaagatcaactgagtcaccttctacgacaagtgtactagttgtacaattgataaaataaggagaaattattgtatcaataaaaaatttggtatcaacaatacaatcaatgaaattatcgattactcttttgatttaagagataaagaatttggaatttttggacttttttttttatttaattgaaagaaacaagagcacaattgaatgcactagaaaaatcaattaataaaaatggttaggtgtaagttgaaattcccttgattccaccctaagataatcttttggtcgtcttaattatgtgattcaatttctcttacttagctaaacttcaattcctcggacgataaacccttttttgctaatgataagctctaatccccttatgtcagcaaattaaagaaaggcatggacaattcacacaagtgcatacaatttacttctatacttggactgtgagctttgaatcgattggtgctctgaaccaaaacagagagattgcaccaaattgttcctgtgaaccaaactaaaccaaaattagtttaaaagaattagtttcaagttttgctaagcttaattttatgaatttaatggttgtgaaaagcttaattttatggatttactcgggcatcataatgtataaaagtttcaaaataagctcttggatggatatttaattaatattaagctgttgattcattcaagaaaattgtttttgttcagttctttttctgattttgtataggtttgcagtttgccaatgtttgtaattgacacttgtttgttgttgctctccaacaacttcatggtagcgcggagaaattggagatttgtaagaaattaagttgttgctctccaacaactatatgtagatggttcaagtcaaggcaagaatatgattgaaggagatggaaaactaagcaatgtcgacttggaaatagaagatgaatgtacaatatgcttaaaggcgggcaccaaaatgattttacataattaattatggttagaattgattatataataatgtaatttttgtttggataatagttattaaaaatgatttttttaagcaacggggagcaaagtctagctaatgggattcatctctcaattctattgacaccccaatctcatttgcaccataacattcactctaaaatatcattgatgaaaagattaataaaatacctcggagggtcaaaccataccccatcacaacatctgaaaatggatttattaagagagactgttgtttgaattaaattgattttgatggtgtaatgatcaaaatggatttgaatgtctacatacactgatttcctattacaaatagttattttgatatatatatatatatatatatatatatatatatataaaattaaacccaaatctaccaataattaaactgaaatataatatttccttttttaaaatgatttatcacactactatggttatgagtacaaaaataaattagataaaatgcattcaataaaaaaaatataacaattagaatctataaatataggaagaatttttattatgtttttaaatcaataaaaaaacatatagatgcatatgagagcattgatgtgaaagtaaattagacaaaaactaactaaagttattttggtagaagtagaagttattattcctacttcaactccatcataattttttcagttaaatttgattatatcaaaataactaaacatgcaaaatctagtatctattatatctactatattatatactacctccatgtctatttataagattcaattatttaattcatcaaaattaaaaataattaattaagttgataataatgaatttgttctaaaataatatgtttttaaaaatactattattattaatgtttctctctcttctaaatatatatatatatatatatatatatatattaatatgatttctctcttatttaattaggaatcttttaatagaaaaaaataattgatacatgagataatatggattataatttaattaacactaatatatttttgtaataattatggtaattttttattatcgtggttttattaaattgtcataaatatttattataatgataataataataaaaataaatgttatcttaaaaagttataatattgtaagaaattataaattgtaaaattactactgtgcaagtcatgaatcatttaactagttttagataaaatcaagtttgactcatgttatcatgtcattatgttcattcataattttaaagccaaaattcaaacacattataattaattcatattatctttttcgtaaactacacatacaccttgtcaaagtctttttctttccatgtggtttataatttaggatttagggttcttattatccttgatttaaatcctaaatcttacatatatagttatatcttgcacgtgggataatttagtatgaaacacggtgtccaatgtcaaacaactaatattttggttaaaatatatgtttagactttgtactttctttgaatattatttttagtcttaaatctttcataatgtacaatttaatccctattctgacacagacgcttgggagagtgtaataggtctcccatgatggtaaagtgaatttttcaccattagatttatcaaatttcaaacccatggatgaatttttttttcttcttatttctttatttttttccttttcttcttgagtttcccgatttatccctctgacttattcatcactattgtcgttaaccactatgtgccgttgccaaaaatcacctctggcgacagcatttcatttttttcgccttccttccattttcttgcctccgacaacaacacctacgcagaaagcaattttgggcaacccctacctttcctcctttttccctattccacatccacagatggtcactacggcggcagagccaccaccacccatcacatatctgaacatagaaaacactgccagattgcaaatattacatatcaatgctataataatttccttgaaactgcaatttcaaatataatcacaaatcgtcataaaaaatgtcatctgattttcaaaaccaaaatcttaggtcttttattctcccaaattggactcaaattaaaattgagagtaaaatggtatagaaacaacgtttatggaagaaacaaactcgtaagttggcagttggtacctatgagaaaaaatcaacacgtacacaacaaatatcaaaaagctcaaaactttgggagactaaaatctggtcaattgaatccaatttgggtttaagtgaggcaatagttatataaagctttgtgactgtttcgtcttccatgctttttctcctgttgaaatcttgttgcagaacaccgcaagaaaaacagccaaagaccctctcgagttctctctagtttactccgcacaacggccaggcaacgactcattaacatccccactatcaccggccatcatgacaccatcgttgccgctaagatgaagtgaggaagaatgggaagaagagacgaaagaggaaaagggtagtatgggaaagaggacgacaaaaaagaaaagaaaaattataataaaagaataaaattttactatcattgatttttaaacaagttaatctgatggtcataaaatactttctcatgataagtgattgattacactctcctctcctgttatagcctgactctttctaaactttataaaaatgtgttggacaaataattatttttatttataaatgtgtaaattattgataaatttatttcttaaatatgaaaattttaatttaaattattaaaagaaaaaatgtgacaaatttatttatttgttaatttttgtttattattattaatgaaaaaatttatgttacttaacataaaaggattaaaatgtcaaaaataattattaatatgactggctgcataaattattgaataaatttcaccaaaatattaaataaatatttttcaggcaaaagaaccaaataaatacaaattaaataagaaattacgcatttggggcaactttcaaactatttacaaatctggggcaactggtcacgcccagaaccaggcgtgactaggggggtagtcacgcctggttctgggcgtgaccagtcacgcctggttctgggcgtgaccagtgtgtatatataccccagattgcactgttcactcacttctagcttttgacttctctctaaaagcttctctctgtcttctctctaaaaagttctctgatttctctctagaagtgctctaggttctctctaaaagtttggaggcatcagctttcttcggtttccagcaacgaagctgtgtgacaagtaagttaatttttttttttaattgtgaatgatatttaatttattattttgttgatttaagttagttaaatttaatttattattttgttgatttaagttagttaatttattgattattagttatatttagcacatgatttattttatgttgtagcaaactgttagatggtaggatatgatttgcactagtttagggttatgatttagtattaagttaagggttacattttatggttaagatattgatttagtgttaggtttagagttagattttaatcccttaaccctaaccctaaccctaaacctaaccctaaacctaaccctaaacctaaccctaaccctaaccctaagccctaaaatcataaacataaactgtaaccctaaatggtacctttatttgatcctgaagtagattgtcatcaaattttaataattttaggattagaagattatagaaaatcggtaaccctagggaatagtgtttagaatggtttagaaagcgacttcatttggtgtgcatatcaggaatctccgagtctttagaattgcaatgaaaatgacatgtgggtatgggataatcccaattttgatggtgaattagaaccctttggtcgctgctcgagagtctcagagttggtgggtaaggagtgtatacaacagtaatatcgtgatccattcgaaattgcataagaacatgatgtgacaagtactgttgtatacactccatacccaggtaatgttacaaactattttaaattaactactgaaatcatgaaacaccaggacgctgaggacaagctctccgattatgtccaacagccttgcaaatttcgcatctgctgcgtctttgactagtttcgacttcgtccatctcgttccgaattctggtcgcctttggacgaccctttgcacgcaacttttccttgtcgggtatgataaccggaccgtcactcggtggaatagcaccttcattaccaattggttgccacggaaatgagtaggcctgcaccaaattacttatgaggaacacatcgtcaacatactgaaaaggattctgccgaacatgtaaagcagctgttgcggcgtgactgcatgggtatctgaaggccttaaacttgccacattgacaaaaccgcttcccaaggttgactgtatatgacctctcacagccttcctccacctcaaactgtgttcggtcaagattataagtgcgtacgtggtggcctgtagctacggtctggttatgcctcatagcatcaaccacatttctgcaatgtcgcgtcgaaccctcaacttgtgaaatagccgcctgacccctcgttacaaaatattcaaccaatctgctgtacgtgtgtttcaccaaagcagttataagcatgttcctagctcccttcaacacccgattgactgattcagacaagtttgtcgtcatatggccaaatctcctcccctctacatcatatgcacgtgtccactgttccttggggatgctatcaatccattctgcaacctcagggctgctatcacgaaatcgtgctaacgccgcctcaaaatcaaccataaagggattataacctgcaaaacaatcatccgattaacactaatttacttactatacgaaatattttaatatcgtgtcgtaattgttaaccatacctaaattcatcaggttcttcttcaagcgttgatttctgaacttttgattaaaattactggcaatatgacggaggcaaaacacgtgatgagcatgagggggttgccaaccagcatgattcgccacagcagatagtatgttgcggtgcctatctgaaatgagacaaatgttttgcctctgagtaacgtgaaaacgtatgttagccagaaagtatgaccaagcttccaaggtctccccctcgactatggcaaatgccagtggcaggcattcgttgttgccatcctgggttgtggcaatcaataatttccccgtatacttcccatacaaatgagtgccatcaatctgaataattggtttgcagaaattaaatgcctggcaacactgtccaaacgtccagaacatgcgaagaaacacacgctttccccgtaccagtcgatttgccacaaaataatcattcgtttgaatatcataaaaagcacctggtgaaaaacgaagcatatagccacaccacctgggcaaaaatgcatatgattcttcccaattcccgtaaaccattgccattgctttctgcttcgcgaaccaggccttacgatatgaaactctgaatccaaatgtatgggtgatcctttcccgaagcaatgaaatcggcacagacggttcctccttgatcattcctaacaattcaaaagtaacattcacattaaatttaaccattattcaacacatacagaggaaattttatacacacgtacctactaaaattgaggcaataacatcagcatcaagctgtctatgaccctgtgaaatatggtcgttaaggcagttgtgattgccgccccatctcgaaacaatccacttctcaccgaacgccggtttagttaccctaaccctccaggggcaaccctctttatgagcaatacacttcatgctaaacttgttaggcttgctctcaaccacataagcctcttgatgctccttcatcaggttccgcttacatgccatctgtgcatcctttttggaggaaaattcctgtttaacaaacaacggatcccctaattgccatggaccctgcactgaaccagaaccggaaccggcaaaagattcttcttcgcttggatgactccaatcaatgtatgtgtagtgaggaattccatcccaaaaaggagtcacctcagcaccttcaaataccaaatcaattgaataaacataacatgcacactaaaataatataacatacagatatataaatgattttagtcatgttacataccttcaacaggttcttgtgattgtctacctcctacgtccggatggtgatggatttcagatgaccccgcagcagtgcctgcttggaattcagtcgcatccacaccggcatcgtcatcattatccgacgcactagcaccctcttcaagaagacgatcttccatggcaatgttctcatcatcgtcatcctcttcgtcatcatccataacccaagttgggtcatgtgaatcttcctcagacacatttacagatggagcagcacatgacgcagccacatttacaactggagcagcatatgacgatctacgcctactaggatttaaaggaactgacctaatgggtaaaacatcatctgccacagtatactccacgtacaactctaaaaaatctttcgttgccaacttaaaaaattccaccattagcaactttacatcttcgtcgtccgcaacttcaaaacccatgtacttttcacgttgccataatcttcccacaatacgtgtgatacattggttgtcttgcagacgtaatttttggcgtatcttcacatgtacatcatccattgtcgagcttcgcttcaaaagtgtctgccttttttccccttcaaaaacaacaccttctctcccttcaaatatccttccattataatttaacacaacacggacaaattcctcaccacctgaactcatttgtttcactcaacaaaaacaaacacttcttcccagagcttcgctgtacacataaatttcaaaacactgtgttagaatatcttcttaaaccctaaaccctaaactccgaaccctaaaccctagctctaaggcgtataaatcctaattcctaaaccttaaaccttaacccataaaccctacaccctaaacattaaaccctaaccactaaaccctaatctgttaaccctaatgtgtgaaccctaatctgtcaacactaacccctacactccaaacactaaacagcatgaagatgacctaaacgtgtacactaaaccctaaccagtctaccctaacctaaactaagctatacaccataagaaacattttcgacaacactaaaccctaaacactgacaatttcataatacaatatattaactaatatacacaattaatcaaataacttacttgttcgcagagcttcgctgcaaaatcactaacactactcttctgcaactcgattcaacaatgcgcaacactgagcaaagaggggaaactgcatctgggggtatatatacacactggtcacgcctggttctgggcgtgaccagttgccccagatttgtaaatagtttgaaagttgccccaaatgcgtaatttcttatttaatttgtatttaattggttcttttgccatatttttctagtgttgcgttgaattcaatggttgttggcatagttgactataactagtaaaaaaagaccagacttaggatataatcaaagaattaaatgcgtcaagggaaggtagataaatatataataaatatataaccacagctatggcagaaagttttcgtcaacaataaacatatttaataatagatttttaattaaaatcttagaatatctttcatataagattttaaataagaattttgagtttaaatttgatttttattagatttttcaataaaaaaaataaacagattttcaacctaatgaatgaattactataaaagaacccttaagacatatacaatatttaaaaaagaataatttttttccatatatgttcttgatatctcaaaatgagatttattactaaagaaaaaaaatgtaagagatatttaatcatatgtggcactatgggtccaccaaaaagtggtttaaagatctcaatttggaatttaccactaaagatgtttttatgtgtcatttttttggtggacccaatagtatcaggtaggattaaatatttatgtagatctcttttattttttctttaataataaattttattttgaaatcttaagggaggaaaatagaggataaaagattatttccttttgaatattgtacatatcttcggggttattctataagaactcattcttcatgcttagagatctgtttacgtcttttattgagagatttagtgaagattagatcttaagctcaagatccttgcttaaaatctagtactaaagatgtttacatctttagtggtagatcccaaattgggatcttagaccacttcttagtagaccctatagtgtcaagtaagattggatatctcttaagatcttttttatttttttctttattggtaaatcttattttgaaatattagggagagagagagaaaaaaaattattctattttgaatattgtgtagatcttaagggtttttctacaagaattcattcttcatgttgcatatctattcatttcctttattgggaaatctagtgaagaccagatcttgaactcaatatcattgttcatctttagtggtagatgccaaattgaaatgttagaccactttttgatggactccatagtgtcacgtaaaaaattgaaaatctcttaagatttcttccatttttttattttgtgatagatctcattttgagatcttggctaggggagagagatgaaaaaaactattctttttttaacacagtgcatatctttagagtcttttctaagaattcattcttcatattggagatatattcacctcatttattaaaaaaattagtgaaaatcaaattttaaattcaacatctaacactaaaaatatttagatattatattattgtacaaggaagaaaaataatattaaattgagagtaattacactctcccattgtagtatgtgtcttcctaaactttataaacatgtgttggataaataatcatataattaaatgggtcacggaaatatataataaaaatataaccaccactatcatatcattgtataaggaagaaagataatattaattaaattaagagtaagttaattaacagtgtaatgatagcgaatttcgctaatgcacacaatttaatgattttttttttttctgttaacaaatttaatgaatatatttattcactttaaaaaagaattaatattattagaaatcattcaacttaaaaagcttttgaaaactttagggttgaggtgttgaacagttgaacattgctgtaatccacaaaatgtcatattgggaataattattttaagtgcaagttggaaaactaattaagggctattgttttaccaccatgtataatatgttcaagcttcgcaggctggaaagaaagaagcaacactgatcgaacagggaatttcatagagatatccaattcacttcattttccatagaattaaatcatgaactccagtatcgaagtttcagatgaccacataattcagtttataccaaccccagatcacatactcctattaaatatcatcaatccgttaccttttgtatgttatcattaataaaaaaaaaatacataaaaaaatatgataacaacaattaccaacataacaatcaaaatgtgggtaactatcttttagtcttgctttgaattcaatggttgttggagcgagtttaataaatttatacatattccgataataaaatgcatctagtcttagctttgagttcaatggttgttggagtaattgattataagtagtataaaaagaccagagttaggatataatcatataattaaatgcgtcaacggaagttggataaatatataaccaccgctatggcagaaagttttcgtcaacaatataagagtaggaaattgaaggttttaggtgtgtaaagatatcgtatcattgtactacgaagaaatataattttaaattgagagtaagttaattaacatagtgtcttgatagcgagtctcgctaatccacacaatttaatgaatataattatttttataatgaatatttttttctgttaacaaatttaatgaatatacttattcactttaaaaatgaattaatattatataaatttagaaatcattcaacttaaaaagcttttgaaaactgtggggttgaaatgttgaacagattcaattaacatagctgtaatccacaaaatgtcacatcggaaatagttattttaagtgcaagttggaaaaataattaattaagggctcttgttttaccaccatatataatatgttaagcttttcaggctggaaagaaagaagtaacacagggaattttagagaggtatccaaatcacttcatttccctagaattaaatcatgaactccaatagcgaagtttcagatgaccacataattcagataaatcaaagtcatgagcaaactccaattgccacttcaacaaactcaccgacaccaaaacatgaaagcagaggactgtatcaaatgactccagaagagctgagtaagttatactttaaactattgcattcacaagagggtgcatttcagagatcatgtcttaagagtttgtttattttacatttcaacaatgggtttagaaaattattcttttattcgaaagataaaaaaaaaaaaagtagaatcacttttaaagtgagtgtaaataagggcttgtttgggatgtaaacttatttagaaggatttctaaaagaagaaagtaagaagaaaaaaatgagatgattttcttcataagctaaaataggttttttattagctcatttatagatgtcatttcatcttttagagaagctgtattggtgatcttctcaaaattagctaatggagaacttatttttacttatggaaaaaataatttcatttttttcttcttattttcttattctaaaagtgtttttagagaaatttattcaaagagttctaagtgacatgttaagatcaattagcttttgtcaactgaagaaaagaaaaaataaattacttctctcaaaaacaattttacttatcatcatagaattaattttcaaacaaaaattcaaatttaattttcaaacttaattaaacttgatgatgattggatcccttagacaacatgatctcgaatttctcagctagatttcaatttacaaatgatgaagttattaggaattcaaaatttgagacaagtttccaagagaatttttacagatttagggtaaacgagctaaatagtaaaagttatgattattatataaaggacatattataatgtgaagtttgaaaggattgcaagttctttaaaagaagatatgagaagacatgtatgtggggatcattggctccaagtaaaatcgattattgataaatgtcctgatatggtacgcattccgttaaatcgtacaagagaaacagctcttcatcttgcagtaagggaaggcaggggaggaattgtgaatgagttggttaagcgtatgaggccagaagacatgctaataccaaactcagatggaaacacagctcttcatctagcactaataaatcaaggcagccttgatattgtgaatgaattggttaagcatatgagaccaaaagacatgctaataccaaactcatatggaaacacagctcttcatctagcagtaataaatcaaggcagccttgatattgtgaatgagttggctaagcgtacaaggccagaagacatgataataccaaactcatatggaaacacagctcttcatctagcagtaacatgtaaagccaaccttgatattgtgaatgagttggttaaccgtatgaggccagaagacgtgccaatacaaaactcagatggaaacacagctcttcatctagcagtaataaatcaacgcagccttgatattgtgaatgaattggttaagcatatgaggccaaaagacatgctaatacgaaactcatatggaaacacagctcttcatctagcagtaataaatcaaggcagccttgatattgtgaatgagttggttaagcatataacgccagaagacatgctattaccaaactcaattggagacacagctcttcatctagcagtaagtgaaggcaggggtgaaattgtgaatgagttggttaagcgtatgaggccagaagacatgctaataccaaactcaattggagacacagctcttcatctagcagtaacaagtaaaggcagccttgatattgtgaatgaattgattaagcatatgaggccagaagacgtgccaatacgaaactcatatggaaatacagctcttcatatagcagtaataaatcaaggcagccttgaaattgtgagagagttggttaagcgtatgaggccagaagacatgctaataccaaactcatttggagagacagttcttcatcaagcagtaacaagtaaaagagaacttgatattgtgaatgaattggttaagcatatgaggccagaagacgtgccaatacgaaactcatatggaaacacagctcttcatctggcaataacaaatcaaggcagctttgatattgtgaatgagttggttaagcgtatgaggccagaagacatgccaataccaaactcaattggagacacagctcttcatgtagcagtaacaagtaaaggcagcgttgatattgtgaaagagttggttaagcgtatgaggccacaagacatgctaatacgaaactcatatggaaatacagctcttgatctagcactaataagtcacggcagccttgatattgtgaatgagttggttaagcgtataaggccagaagacatgttaataccaaacccatatggaaacacagctcttcatctagcactaataaatcaacgcagccttgatattgtgaatgagttggttaagcatatgaggccacaagacatgctaatacgaaactcatatggaaatacagctcttcatctagcagtaataaatcaaggcagccttgaaattgtgaaagagttggttaagcgtatgaggccagaagacatgctaataccaaactcagatgggatgcttccagttcacttggctgcttcatatggtcgtcccaaagaaatggtgtacattttgtcctctaaggaagtgcttgacaaaatgaatttcaagtatattgaacgactgtttatgatgatcattaagatcgacatgtttggtaagtgtaaaactaattaaacaaccttatttctcctttttgtaatctagttctcttttacatattatgatgttttacaagctgaatcgaatccattgaacgatcagataccatgtgatatatatatatatatatatatatatatatatatatatatgagatgggatccttttacaccggtgtaagaattgatagttttgcaccaataggaatgtaatcaaatagtctaattttcacatattttagaagtacatataccgttaatttatatatatatcaattaggtttcaaatgatttcggattaatatgaaatttgagacatgtgatctacatgatataagctttcaatttaacggtggattttgtaaaatacttatccaataaaaagttattaaatggtgtaaaactatcaattcttacaccggtgtaaaagaatcccatctctctctatatatatgtataatgtttacaattccaacgtcattcgataatatcgaccataattcaataacaaatttaatgagtatcagttgaaataattatttatgactactaggtttttgaaagactgtgatatcatcctttaaaaccaaacaggtcttagctaaattctcattgatttcatatctataaaaggagatatatatgaactcgtatgtggcttttcaatttagttggagtttttatttaccttgccttgtactatttaatttgtgcatataacagatttagcatggcgattatttgaaaaatatccaactgatctggccattgcaagaaatgaagaggacgttacagcagtgaagatgctggagggaaagcctagcggaatgttaggtaacctttcacaagttgaaaatggctttttttttttttttgtgatctaagctaaaatttagatcttatttgacatcatttccattttgattttgattttagaaagttatatatatttttgttctatataaaaaattaagaattagtccttaattatctatatcgagtgtaataatggtatttgatgtttgttgagttattcgaataacacattaatgtttgccaatgaatcagacagtcggctatatacaaaagtattgactcaagttgaagcattggaacagaaacgtgaagatgcaataaaatcaggagatgatggggctgtgaagaggcttattaacaataataatagattagtgccttatagggaccgcagaaatggatggaacctactgcacttggttgtgctatgtcgacaagaaacaatatttaatattataccattgggattaaaagagcaatcagtacaagcagtggactacggaggtaacaacattctacacttggctgcgcgtcttccacaaggtgaattcgaagaattgtccagtttaagagcaagcattcaaatgcaaagagatatcaaatggttcaaggtcaattaatttgctgagtttttcttattcaaacattctttattcactcgcatgggatcgatcagttctagcaatcttattttaaaaatttaaaattctactaattttaggattttgttaactagactgattttaaatctttaaaagtaacaagttttaattaaaaatagaaatcattgtatgtagtatttgttgatattgtaacaattttttttgaaaaattacactagcattctttatacgtttgaaatcattacaataacatcccctcaaaccttactctaatacctcaggaaattgtgtaattacactagatcttgggaggtgttgctgtaatttgttctagttattaagtgatagttgaaagattaattaagttatgcatttggataccatcatttacatattctcttgatttgtatatagtttgtggagtcgaatgttcctggtgaactaaaaataatgagaaacaaagcgggcatgagaccaattgatatattttctgaagaacacaagaagttatccgaagaaattaaggatgcagccaaaggaatggccgaatctggcatgcttgtgtcaacacttgttgctaccgtagcatttgcggctgctctgactgttccaggtgataagaccaatgcgtggtttactgtcttcatattgacaaatgcagtcgcattattcacttcttctgcctctttactctcattcttgtcaaatttcacttcatcaagattcgcacgaagccaatttgtgaaatcactacatcccagcttgactattgggcgttggttgcttattatctccgttgctgctatggttgtggctttcactgcagcctcctttttgatatttaatcacacttccaagtgggtttcttatgcagtggcttcaatggggctgttcccaatacttttgtttcttctttttcattttagctttctcgacgaactctggtggtctagatgttatcgttttgaaaaactggactaacttattacagagttacagagacattggcataacttcaagacactgtattattatttgtttgtggaacaatcaagcttgtgtttaaatttgagattattctacattttctatctcatgaaatattacctttcttattgttccagctttaatttgagactatactacacaacgcacgtcaaagcttttctccttccttctatgtggttggtgaagggatcaaatcttaacacagaaaaagctttttttattacacattcatctttcactgagacttaatcctactccatttgaaaataattactatatacaagaaatttataaataaatataaaattaaaatgaagagaaataaagagataaaaaaaatattcttgattaaatgtgttagaaaatgagaaatgaaattatgagtcctaaccaaaccatatttctcactaagagacgtgaaatggagggagaaatggttagcagtgttcttttacttttacttatgtttaaattttaaaaaatcaaataattgttttataataaaatatttttatgttgagaaataatgaaataaaaagttcagttttttcaaattaaattttattttttatttgtatgaacatttttgcaatgaagatatttttgttttatactctcttatttatttaaacaactaaaaatttacgtttttttcttgttatttctattcatgtcaataatacattattttcatcgtattttgtgtatatttcttgagcaaagttatgtattgagagtgtaaaatatttatatcatcatttaatcacaatttattgtgtataataaatttgttgatttttaaaataataatttatgattaaatgataatttgtaaaatcctaaaattgttttatattattagtgcatatacattaaatttttatttctatccctcttattttcatcttattagtgcaaatcatgttgtcggatcagtgggtttgatcctcagatttgctctcaaattgtactagagaggacacgtcatgtgatacaataacagacttacatacacaacacaatgccacaatcaaagctaaaacaaaatcaaaatccctaagtttaaggatctgaatgtagtgcctactataacctatattagaatttctcaaataacaataccgtggctatttctaattggaacaatcaatatctccactttatcctaaaataaagtttgtaaggactaaagttttcaatgtcctgtccctcctaatcttcctaacgactaaggatttgtctaatactactactctaattctcaattagaactttataaaccaaaacaggttcatctacatttcttatcataatcctcttcatcttcatcttcatcaatccttccatttaagttaattagctagttgaatgggatcaatcttcattttttccatatcagacaaggaccattcagggtattcctcatgcttctcttctgacattgatacccccttccgctgccactgcaacgttcaggctctgtgtaaatcatgaaaaaaaaaaaacatttcattattcagataatatttaacatcaagctgctgcgaggttctttagaatgttgcatctctcagctagaatttccaccttatgtgctagtgctgattctatagtgcatagtttgctcaattacaatcacagttttcaccaaaagttttaagaaaacagatagttttggttctttgtataataaggtttacagactattaaatgtacttgaatttgaaggattccatagaatatgagaaaacgtattggacccagtacatatgaatgttataagatcattcttgttttgtctttgataagtcctctcttagcctcatcaataaactacgaatgataaatgttattcgggtagatgctgacaactcatatttttctagagcaaacatgattattatataggagattaagaaatttaaacctaagtttcttgaacccttactatacatttaagcctaataacttttgtataaagaacattcccaactgtattcgcaagtcagtgaagcaacttgtgaatttccctaatgactgaagtaaattcttttgtaaccagcaaaagattcacagtctgcatagacaagagataattactcagcagaaggtttaatcacacaagaaaaatttaagctaactactgagaagtaattgatatattaccttgttatttctcttgggctcctcgtggctgtcagtatcatcatctttcctaatataaaataaacaaaattcaccacacagaaagcatgttccaagtaaaatgagtactaatcagagcacaaacctcctagaaacagtatggtcatcacgagttgcaacagaaccgcctaaatcagaaaccctgctgacaatatctcttagaaaatcaaagacattaaaagtctgcactcactgttttctgcaaaggcaaggatgcaagtaactcagacatttcagaaaccagaaagtgaaggtaaacaccagaacaaacaacatatgttccaaaagcaagaccatcccaacatttaattttcttctgtagatgtcatttacacgtataatcatgtttgtgcatgtgaaaaatagaagacaaaagagggaaatttaatgagactcagcacattatcattagaattttcagatccaatcgttctaggctgataccaaactaagatgggatgcttccagttcgcttggctgttttatatggccacaacaaaatggtgcaaattttgtcctctcagaatctgcttcacaaaatggtttataaggatattcaacgactatgcttgttgctagacatgaaagaggaccacagcaatgaaggtgctcgagcgggtctggaattgtttaaaaaactatgggctcaagttaatttgagactatactgccttttccgaaaactgcatatcttacgtcaaagctttgcagcttctttccctgtggttggtgaagggagcaagtatatgtcacaaccactgttattatgttaagaaccatttagatcgacattttaataagaaattatagttattccaaactttgagattgagccccagttattctgtgtttcctaggacttatccatattaaatataaacttcagatatctccaatcagggacggaggcatgtggatctagagctaggatcaagttaactgtactttggaattttagtttcacgtctttcttattagtattagtattgcaagtagattcaaaaccataagaacattctttatgttccaccttagataacgttcacctcatgttcacctcatggtaggcaatgcaagtcccacattgggtagttaattatacaaataattctttataattgtctgacatgtgtactaattggcccaactcccgcttgtaactcaagtgatgttctttgataagtacgcttaaatttatttggtgaaaaaaatatttattttgataaaataaataattttctattttttagtgtagttgtctaaattgtgtttatgcttaaaaaacagttttctacttattttgatcaacattatttgtttattaaataagtgcttatttaaaaaatatttattttaaaattacttattttaaatttaaacaaactagtttgaggcgagattagttttaaagagcagcaattagtggtgcttatatattaaaaatcaaataagtatattctataataaaaaataataatatcatgttagaaaaataatggaaataattataaatgtagtgcctaccataagcaatgcctacatgagattaaaatttctcataagtcataactatactggcaaatggctatttctaattggaacaatctatatctccacttttaacctaaaacataagttataaggagagtattcaataccctatccctcctaatcttcctaaactactaaggagtaagtatctatctactgctcctataaaatctacactctaattccacataagaacattctaatgacgggcctgtatgagaagtaatgaatcaaccaacacaggttcatctacatttcttcatcataatcctcttcatcttcatcatccttccatttatgttggctagttgaatgggatcaatggtcattttttccatttcagacaaggaccatccagggtattcctcaggcttctcttctgacactgattttgcagatgaactagttgggacagaagttggtgtgtctaatgaatccatatccaaatctggttccaaatttaagtcaaaatttcgaatggacacttcagccggtttgcttactggaaaactctgcttaacttcttcaggttctggcacattttccatgctttcattgctttgagtttcattctgcttcaatgcatcagaatcatcttcacacttagcatgtgaactcatcttttgatctacagttctaattccacggccacaacccctacccggctctggctgtgcaaatcatgaaaaaaaaaaaaaaaaaaaaagttccataattcagataatatttaatattaaacagctgccaggttctttagtgccaattctatagttttcagcaaaagttttcagaaaaccagacagttttggtcctatgtgtagtaagctttaagttgaagtggggcctagcctcacagacttagacatttagacgtacttgcattcacaagccactagtgagtttccctattgactgaagtaaatttttttgtatccagcaaaaggttcccagtgtgcatggacaatagataattactcagcaaaaggtttaatcacacaagaaaaatttaagctaaccactgatgaagtaattgaatacagttgataaattaccttcttttttctcttgagctcctcgtcgctgtcattatcatcatctccggcaactttcctaatataaagtaaacaaagttcagcatacagaaaacttgttccaagtaacaagagtattaactagagcacaaacctcttcttagtgacagcatggtcatcgtcagttgcaacagaacagcctaaatcaggaaccttgctgacaatatctttcagaaaatcaaagacattaaaagtctgcacacactgttttctgcaaaggcaaggatgcaagtaactcagacattttagaaactggaaagtgaaggtaaatactagaacaaacagcacatgttccaaaagcaagaccgaccatcccaacatttgcttctgcagatgtcatttacatgtctaatcatgtttgtgcatgtgataaatagaaggaacaagagggaaattgtttgataccgagcacattatcattagaattgcagatctgatgttcttataagtacatagtaataaccgccctccaaaagaaagaaacctgcagccttgtgaccaccttgaacagacttgacatagacacaaatttgaaccaagaaaataatagaaacttcacttacaaatgaaaagcattcatagtctttgcccccctcctcaaagttatgttcgatcacacaaatcttgcagaaatagctctagtgctttagctgcaatacataaacacaaataatcataaatcagagataattcatagaaactcccaaaaccacaataaaaaaataaaataaaaaatcatttttcaagagaagaagaaaacacccaagaatatgcatgaaagagaaaggctacttacaaactagaagaggcacagccattgcaatcttccctacatcctcgtcagcttgcataattttcttaatcctagcctgccaataatcaattcaataagattactcaatcattacttaaaatgtctaaaactaaatcatgttggcagaagaggattctaatttgatgcaattaaggaaattccactgcaataaatgaagaaagaaataaattttcaactaaaagttaaaggaaaagactgagtgtttgtcctactccaccagaagtaatctatgctcaaattccactactcactctcctcctaaaaataaaagtataaaagatatgcgtgtattgtgcaaggctgtggagacagaaaggtatattgtctatattcaaacaatcaaatacatgtacaatggggtcaaaagtgtaagaatacaaggtgtgcgacagaagacccttgtgtctatttcccacatgaacaaggcttaggtatgtgtggagaaaaactatagaatctgaataaagtacaacagatgatgggtagtcccatagttagagatagagagagaccaacaaaaactatatttgtatttaaatgattaacctatggacatgatttataataggacatgatggcattgtttggtccatatattccagcccacctagtgggaaaggagtttttgttgttgtattattctgtttgagcacgtgtgatatgctatccaccaggatcatagtatggaaatacttggaagcagtagttttaacaaaggaataaacaatcccttctcagaagatcaaagaataaaatccagaattggaagtaattttgcaaaccaaatggcttacaaataaatttgctcaactttacatctatctaaagtataaaaaaaaaccacatacttcatttcccagaggctctttgctatgcgaagatatgggggaaggatattgtacgcaaccttaccctttcatatgcaaagagacttttccggatttgaactcatgaccaacaaagtcaccaaggctcaactttaccgttgtgtcaggattcgtcctcatctatctaaagtatcatttctaaaatatatctacaggacaggtagtggccaacctacaccgcaaaaaataccattgtttgagagggaccaaattcagggaatttttagaaaagatacaaaataccaaatttagaaaaagttagaaggggaatatatcacaccataccacagtactacacacaacatgctgtcctagctttacaatacacaaagcctgacctaaagcaatgccaaaccacctataatgttttacattccaaaatcggtaattgatattccacagccaaaccaaagcatgcggatgctttacaagacaactactatttccaaactacgtagacataaaaacgaaaaacgaaattataccaacaaaatcgccaagttaagacatacacataataaaaaaagatttaagatatgcgccaatcacaacttcaaaacatttgtttcctttctgattaaatatgttgcactacattaaaattcaacagcaggctccccatccttctttctctttcagaaagaaaacttatttcatccaaattaacaacattctatggggcctataacaatattgaccagaaaaacattaactttaacatctaattcattaacaaagtcaacaattcatggcaaaaaaatttaacgcaacaacaattccaaagcctcaaatgttaatacaaagcacgtttgcacaaacataactatcagagattccaaaaccaagagaaacccatctcccatgttagtcagaaacatcaatttacacaaggaaaacaaaaaacaacaaacccaatgacacaaaaaaatagcaaacataaacaactcacaatgaatagaatgcaaaacaacaaggaacaatattttctacatgaaaaaagaaaacaaaagcaaagggaaagagaaattttaccgcagggaaacgagtatctagattcttcctcatgttgtgaaaaaaaaaaaaaaaaaaacggttggagaagaaggcgaaaccccactttggtttttataaaggggaagaaaacaagattaacgttgaagaagacgaagaagcaaagtgggaaagttttaatttgtattttgtcgtgtgtttgaagtgcgtccttcccctatcacgaaagcgctcatttaggagcctccaagtccaactatgcacactttgtgtttccaaacgtttcaaaccgctaacttcttttctagaccaaagccaaaaccgaatttaaatatagatgatgagttattattcattatttcattcattcatactacaaatctacagtcatattataataatatttttattttttatcacaattttttgttaaacatgatattaatataaaatagtctcatcttcgtcaagatgaatcataatcatacataagataaatttttttccaatactatttatttcatgagttaaccaaaattcaaacataaaccaattaggacaagatattatttattatatttttatatatttatctttttcttagttatctttggtataataagaatgaaaattttaaacactttctattttagttttaatttttatttatttaataaattgtgttaaatagtttgacattataaattagtcagtaccatttattaaaaagtgagttatgatatatactttataaattactatgtgtaattaatgagtacttaaatttatacattaatttattaattattatgtgttttttattataattataattttattttttaaaataacaatatcaaatataaaaattaaaaaagaaagacaaaatatattttggattcctataaaatttgaaaaacattaatttaattttatattacataactaataaatttaattattttctctttaccttcctaagcatttaccttcctaagcatatgcagaatacattataatctattgttgtttgatcttcccccttaatctcactataaagtgaaaaaaaaaaatagcataggaaatgacaaaaattacaattttgaggttttagctgcaatttttttaattcattttgagggttttaattattacaaattttttaatttgtttgtaataatcaaattatgtgtataaatttattagccatgtcaaattattgtctaacagaattatcatttaggaccatcaaaaatatatttattgttacatgatccaagttaatgcaaaaaaaaattatgagaactaaattaatactttttaattttataggactccaaacatattttaaaaaataataataaagatatcaatctgcaattgttagttcattttgtatggtgtacaagtttaataatatttcaaaattattaatatataattatcaccaatattataatatatatatataataaattatatgccttccatgataatattttttattattatacctaataaaattatatgaaaaaaatttatataatcatgaacctatctatctatatatatatatatctatatatatatatatattataaaagaagattttatataattagaagttaattatcactcacacactttagctcatttttaattaaattaattctaattaattaattaaataaaatcaattctaaatctatatttatatctatatcaattaatatattatataaaataagattgtcaattgtgctcagcatatataacaagtatcgatgtagttagatgctgcataattaatttatcttttttgtttaaacaaacaaaataaataaagaaaaacaaaatcatcatgaatcaaaattacaatcacatttaagttttttcattaaaatctatcaaacctaaattaagctacagttcatgaaaagtataatgtaggagaacatcaatcaaaattattattggattgatatcaatccattgaaaggatagttttttaaaatattaaatataaaaggaaatttaattttaccaagctaaaactttaatataatagaaaaaaaattatcataaatgcattgttggtttttttggataattttatgtgatttttaattgttatatattttcatatttaaatatgtttctgaaaatatttaaaaactgaactaggcacaatatttcaaatcaccgtttgcttctatattcttcaaaaatctgaacgccctttcttctccataaaaaatgctttcaaatactcttatttttctacattagtttgtgcaatctttctttatatatgtcttcttcgctcttaatattcacaagtttatgttatttctatttcataaaatatgtttgaatcaatacatgaagaagaaaaaatgtgagcaatccgtccttttcatctttctattgtcatttattttatcttattaaaatttatgtttttatttgtattaatgttgtcgtttactccttaaaaactgtaattttgataatttttttgccaaataatatttacattttttttttcttatgataaaagtatgttctttacttttatgtctttttgtttgttcgtataaaaaattctttacttttactatgtggacttttttttttacatttttgttagtgtataaaaaaaattaaatacaacgtgcttgattcactaaataaaggtatgttctctacttttatgtattttttatttttattttgtgtatacaaaaatttcactttccactctttttttcatttttgtaattgtataaaaaaaacatatgatgtaacatatatgattaaccaaataaagctatgtttttttttttgtttttacttcttatgcctctaattttgtttttgcgtatatccaatatatatacaataatagaatcttatatgtgtagtctaaggcaaaataattttgaataggaaaaagttgctcctgtttttttttattgcaaattggctcagtttgaaacttttgaattcggtaaatttgcacatagctcttagttagtttaatttccttaaaagtcaatatataaatactactaatactaaagtctatttagatacaggttttctttattaaaaaaaaagttttatatttttaataaaaaattcttaaaaacatttatagattgattaattttcttatatgaacaattaaaattaactattttactctataagttaattttttttataaaaattaatgtcgttgtttttatcttttataagatttctgtttcttcaaaaccctaattctgccaaattcagtttgagcctcgaaaaacctatctctctttttctctatctttgttctctctctctctctctctccaacgatttcggcattcaacagcgatccttccgtcgccatcatcgtcatcaacgctcccatttccgaaaccccaggttggttcttcttcgtgttcccatttttcgatttttctctctctttctttcaatctcaaacagcagctatggtcctctctcgcggaattcggtaattcgcctctttgttgttgtgttggggactaagaaactgcgtgtttggtttcgcgttttgtgcaatcgcagaattcggtaattcgaattccgcatttttgccttttgtggtatttggggatttcgggtctctttggattggggaagcatgcatatcacggatcctcgagagggaatagtgtgctgatccttgtaattttgaccttgattgcgtttatatatatatatatatataattttgaataggatgtgtgtgattatagattttttgtatcgagtggccattggggaatattttttttgccagaaagtggaattttttggatgtttggatagacatatcacatatcagtgttatgggggattgtggggtcatggttggttcacaagaatttggatttttgttaggggtggggtgatcgtgtgaaaatttgggggagtcatcaatcatgtcacggcctttgaggaatacgaaaatcaacttcctttttttttttcttttatttactgtgttgattaatgtataagtggaatggtggaggactggagaacatggaatggtgttttatttttgtcttacggttgattgtttgaaaatatcggcgccattgaatcgctgaacttctgtgaaaggtgatactggactgtatgatacttgcactctcaattgtctttttaataagtgttgtgcattcttctggtaaattcaactgaaatattctcaattttgatactgtgccattccgagagggatcttgctttttgctgtcagattggttgttaaattatataaatttctggttgcgcacatataaatgaagtttagacatcattggtaaaaaagttcctctgtgattaaattctctttttaaaatgtattaaagtgtatggacatgaaatccttcccctcttcctatattcctcaatgatttttattaaaacttctttatagggggaagataaactgtatggtttttgtttaattattttaacatgtacttgttttttggcttgttcactttctttttgcctttgttcatttgcgcccccccccccccccctttctcttttccctccctcccacagtgtctattgttatactttaaactagggaatggaagttagttttcattctcattagtttttttgcaagtttcccccaacttgtaagctgttgcttgtttgccaaaggatctgtacaaacatgatggtcctcatttgaacagatttgtttttttttttgtgtgggggggggggggttgtggcgattgaacagaatattatttggtcaataggtttgtgatgcatgtaatcctgtattgatttggtaattaaaatgcaatgtactataacttgttttcttttaatgttacagggccattgactcttaaggatgtctcctgcatcccgatccaagtctaaagacaggaagcctagcaaggaagctcagaaggcttctgcaaagcctacaggatctggtattgcagcagctggtgtgccagccagtgcatataaccccttattaggaacattccatactctggacatgtcaccaacacctacctcaccaatacattcgaatggtcgttttcagaacatagatgagacagatgaacatcctgtcagctcagtggttgctggtgttgagtatgattctgtttctaacaatggtagttggtctggtgagtccgaagaacataaggagaaaagttctaatgttgctgttcgaccggaatcagtaccaggagctgataatgacaagcgagagaaaatccgccagaagaatgagagaaaacatcaacggcagaaggaaaggcgagcacaggagttgcatgagaggtgtactggttatcttatgttaaggaaacttgaggcactttctcaacagcttgtggcaatgggattttctcatgaaagggcaacaatggcactgatattaaatgaaggtagggtggaggaatcagtagcgtggttgtttgaaggtggtgaagatgcagatgttaagaaggatacaaacataaataggggcaatttgaaaattgacatatcaggtgagcttgctcggattgcagatatggtaaccaggtatgattgctcaaaacaggaggtcgaaagagcgattgttaactgtgagggtgatcttgatagggctgcaaagaccttgagagacttgaaacttgatccaccatctgctccaccaaaaccagaggaaaccggcgatcctcctattattaacaatgttaagcagtcaagagttgcaagtcagagctcaatgccacaaataaaacctgttcctttaccaaatcaacccaaaaaagatgacaaggattttaactatacaaaggctgcattgacgattggagtatcttcagattctagtaatagaaatatgcaacctctaaagaaaatccaacctaagtctgaatgggcaaagccccaacaggctactataccagctgataaaaggtggccaagtgcaggatctaatccttccgtttcttattcactggcatcaccgttgcaaatgtcacccccacctgcgaagtccgaagcacaatatatgcctgctggaggtgattttaagaaccttcaacatggagtagccagggaaccattaatcatgatgcagcggccccagactgtaaatgcaaagcaagttccagccacaagcatgagctcatcacctcctgaaattgatgctagttggtatccatctaacagttcagatgctgtcagatctaataatgactttatatctcatgctcgtagcactagaagcctcagtccaaactatctcaattccaatcaaatgtaccaccaacttcagtatcaacctcaacaacaacagtttgttggtggcagcagcaattcagtagatcaccaagggaatagcatttggaatagaacaggtgcaattccaccgcttgctgctgctacatctctaggactcttttccggtctaggatcagcaggcccatcaggggcttcttctccagtagactggagcactggtgggaccatgcagtttgattataccaacatagactggtccttggacagaagtttagcttcaccaaggtccaacggtttatggctaggattttcaccgttttcaaggagcagtagtgctcagatgtatgactcaaatgcttcaggagttgttgctgaatcatcaatgagaccagtgccctcaaatgggagcatgaatgctcccatgcctggattgcaagatggtggagtagcttctgctgagacatctgctgctggttccccggggtggaattctccttttgaagggaatgatctttttagtttaccgagacagtttgtttcttctccttctctgtaaaatgaggggagaaagttgaatgaataaaatgaaagacatcagaatatgtttgatttgatgttggttcttatgattctacaggtgattgttggtggtaagctttcagtgggtggaacatgcaaattatacattctaagttctaacccgccactcatcacacaaaacacaaaatatgccgcaaatttatatttatatttatattagtagaacttatgggtttaacgcgttaatgaacaacttgcgttgaataataaataaagtgtaagaataaggaatgggtaattaatttctgaagtggataccgatttaagctaaccaagtttaaataaacccgtgtttaagggatctagttcaagttattgctcactttggattcatatataaaaaaaattaaacttgtatgttgaatttaaatataaataaatttaattaattttatcttatttaatattattatttaaaaatatctttcatttgattttaatttcttaatgatttttatttatttatgataacaaattttaatgaataatgatattttagaaataattttatttttaatttgagattaaaaaaattaaatcatgtcaactcagtaaaaattaatgagtcacccaaggaaggttgaattaaatgcagtgaatatcatcgttgacaattggttaagtgcttcggttatccaaattatacatcgtggttaatggacgaaattgcgtcggcacgaattacatgcagtttgaactttgaacagacttttaacggaagcatggtttttacttgtgacgaaatcccatttctcccactgtccaaattctactgaccccactcaaatagtttttttaatcgaaatggatccacttaaaccttttcaatggtcattttttaatgcattacgagcaagaagagagaccataactatgaatatgatacacaatgttcttctgtacaatacgagtgtgtggacgatattgatatattatttccacaacttgtcaaacacaggatgtctaaccactatcttaatccgtgcacattttaattttgtgaggaaaatttggtttgatattgttttgttatttaggaattttatcttattggaattagaatatttaacttataaacttgtagcttatcaatataatatttaaatatatatactttttagcttctaaaattttattttctattttggttcttataattttttattcattttagtgtctgtccgtttataattatcatcatctgtcagtatattctttttttccttctgttaatactggttgcaggcaccaagttgcgccattttttgctctttatattttttttcttctactaccaatgttttgtgtttctgcctgatctgcatgtgagtgttcccacgggagcgtatgttaatttttttaatttaacatgggtactgtcactttgaataacttttaaatggtttttgcttccttccaactgggttagctggctcttgtaaagttgttttatttgtaacatgcatgtaaataactagatatatattgcaatcttatatggtataatatgaacctgtttatggaaaccattttgtgtattacaacattaaatatatgagtatcatgttagttactagatttcaacaatgtttatcacagatcactcttcatggaaatactaagacatgtcctttattagatttttcattttctttcttatctttcgattaaaagctaatactgaaatttgatacaatcaacttatgatttactgtgagttgtacctttttgtattcagcttcaccaaacaagtatattgcacagttgaaatgctaggaattggcactattctacttctttgtaaattttgattatgaaatgaaatccaagtcttctacttctttattgtttcatcatgttgattttcagtgcttgatctcccaataggcctctgctatacacgctgacttcaccacttatactctcattgttggtcccagaaataattttgaaggccctggactttgctgaacgtatggaggtatagctaatatgtatagccttgcatgtttgcatgtgttgattgctcatttttttcatgatcatgttatgttaatctttaatacaacaaacatatgcaagtcatagttgtttcttgaaaagtagttttaagttttgacatagcaagtttttgtcattgacaatgttgtaactttttgaagttgtttctgcttcaatgtcctggtctgataggaactcaaattcatcttcattggtgaagccacctcaattaattagttccaggagggaggataaccttttactactgcttggatgttcaagaagcctagttccttctgaattaattgagagattgcatcacctttgaaaaagtcatacggctattttttttccacattttatgtttctgttctcagttattattgaatttaaggctttatttagataaatttagtagaagaaaaaaataataaaaataaaataaactttttttataagataaaattaatttatgtataagttagaatcaacttatttagaatcatttaaattctctaaaaatgttgattttatcttatacatatgcttgttttagcttgcttgagatacacttatttcatttttatgaagaaacttatgcaaacagaccttagtatattttattatgcaaaggggaaactttgaagacaaaggtcgtgtacatgttattcattttgttcctttagaccttcaaactacgttcattgaatcattcacttttaccttatcttgtaagcaccaacaagtgggattaaaatcttaccgtcactccctagctacttttagttccattctttggatcgtttcactatcaaaatcatttggattttggtctgaaattccaccccaatatggatgcaataacttgtggtagtgagcctgagctgccaaattgattagagatcaaacacacaatcacaactcaaagtgaagaagaataacaacaataaataaagacacaaattaatgtgacaaaatatcttggtttttctttatgcacttgcggctagctaggtgttggcttccaatgataactactcataaagtttagaccaagttggcagcatcacagttggctctcttttgtttgctaggtgaatcctttaactttttttttcctctctaatttccttattataaaagaatacaagggttgtgtagagtagagcatgtgaagtgtccattttgcctccaataattttccacagccaaaagtactacaaatatcccaataatctcatatgataaaaagtagtgtggtttgattggatcctgcatgtccttcctctgttaagtctgccccagcttcattgtatagcaatatatgagagtagccaaatctaacggttgacattgacacaattaaccagtgatatgagaatatctactttattgaatggctagctagttgcagaaaataatgtgtgaaaacacatctaaggaagagagaatattaaaagggcatattcaaattatatattctaatttataacatgaaaataatcttttgtgaattcatttgaaattaacatgaaaataaatgaagaaaacgtggatcggagagtaattatttcttttgtcatctcaaagtccaaccttctttcccaaatatcaataggaaaatttaaaagtagccagtgattttaaaactcaattagtagcgatccaacttgttaacatgcgtattgcgctgtgtgtggaaaatttatcatttacctggttactcatcagtttaatgtgtctataagttcatataataaataacgtaataaaaagaaaagtataatttgtccattaccctactttttttttattttttactacttttcatctataaaaaaaaaactattttcccgtagggttaaggggttttgaggacaacaataccccgggagtgcgacatcaaatgcaaaaaagtgattatattttgaaaatcaaaatttttaaacactcaattaaaaaatcatttttttatctttctttttattataatatctcatcaattaaattaatcatttatctctcatttatctctctctcaagttatagataacttaagattgtccaaaaactatttttcaatgcaaaaataaccattgatatataaaaaaagacaaatatcaatcaatattcttacaacactgactaaataactaaaaaaaggatttttttattgaaatataatatatacatgtagtacctcttgatatgcgacccttcatgttgtttgtattttttgtgacagatatacaaacctttggtgccagagaattatgttgcttgtgactcctaggcttggtaattaatgcatgcatgccaacagggtcccaccttttgtttttctgtgtacatgacaaaatcacaaaagcacgatcatgacaaagatacggggttattaacactttaatttcgtttagaaagataattattcatactctccaaatgagtatatttataaaaaataaacttgagaaaaattattattatttaataaaataaaatatcttcagataaataagttaaattttgaaaataatgtagtgtttcaatagttcaacttgtattgtttactagctcatagtgacacttcatatgatttggaaataaacttgaacactcatctatttatctacattttcttttagttgactataaccttaattacccaaaatatcttttgttaacttatatttatgttgaatattttttttgttaattatatttgattttttcaaaattaatttttttttgttatcaacacaaataaaaatcacaatccatcatgttattgttatgtaaactaaaaacaagaaatgaatgatcttctctcttcttgcttttctttattttatttttaaaattatatttaatgtttcataaaagataaattttctcaagtttaagttttgtaatgtcaattaaatacttttggattcttattattttattttatttttaaattttaaatttgatatatgatgtataaagaaagttaactacaataattttaacttttatctaaaagaaaaagtcaaataaagtaagttaaaaataaaaataaataaataaataaataatgaatcattagaagttgccaagttggccctcactatgtgatatgttttcttgtggatcgttaccatttatctatgattatttggacgcaagaaaccacacattcatcttagtctaggactctaggctacattcctagtgttccatatatagactcaatccagtgactatctccgtgtttcattactaaaataaaattccaatacactacatattacatcgtgtaagtcgaagttctcacagcaataagatgtcttaagatgaaactaaatttttacattttcaaaatagataattgtatcaatttacactaatttttccattaatttatgctttgaaactatcagctatcgagggttttgaatctctttatcctgccaacttagacacaaaggatgatagcaaattcttatttaggctgttgatgggtgggttagcaaactaggactttaaaacgtacaacataagtgcttgtgtatttatgactatagccattgtgagacgcattctaatataaattttttgactatgattaatttggatatacatcaaaataatgtcaatggatgcaatgtgcaatctttgaatatgtaaaatcttactttttctcaacttttgtttgagataaaccaaaatgactaacacatgcattgacatgtatacattaaattgttacggcaaaattcctacaaatttcccatagtattttggccataatgcaacccaagttattaaaatgccaagttgttttggcaactcaaccaaagtatttcctaaaggtttccattgctagacctcactaatgagttttgaaagaaccatgctaacaaacagaaagagaattagcttgacaccattctcaagagtgcactccataagcttgatgatgcagttatctcaggaagcaaccttaatctgtgatctggcaattcacattcactggctaaaagattcatctaacaaaccaaattcactctctttagtctttagcatattgtgcttgctgccaagaccccaaaggaaccaaacaaaccaaataagcagcaagatacaatcaaattgaataatgacaggtgtggcactaaagtttcaaagagattcaacaaaccaggcaatttcatgtacaaagattttaagaaacttctatcttccttacatgagctcaagtttaaaatacaatactaataaactctttccttagcattttaaattacaagcattattagacagcaaattgtacttatccaggagaagaaaggatacttttagcgatcaaatggccaaccgctataacttgttccattattctggtcaggagtggttgaagagctgcttcccccagtctcagaataatgattattgttagagttagacgagcggaatggccacaaaaatgataatggatttctccttccatggttctgatggctgttctctctgcccctagggatatcattgctgccactgctgctgctgttgctggcattccttcctccccaacttcgagtaccacgggaactagcctgtccttgaggtggcagctcaacacggcaaacaggacatgagttatgctgaaccaaccaaggaacaatacagtcagaatggtaaatgtggttgcatggcatctctctggcttcagtgcccaattcaaatttttctttacaaactggacagtgtgaatccgagcgaagatgcgcctgtgttatcctaatagtaggcattgcatcaattgaagatcgtgcagctggggctggaccatgctgatcattcatggtgagttgctcaataagttcttccagtccaggacccataaagtagtcaccaaaatcaacacgcctaggaccacctcttgggttgccagcagccaaggtgaatccgggaacttgaccatgaaatattaaataaggaccggaactaaaaacgccccaactctgttcaggaactgggacagaaccagacctccctctaacatcaaagtttgagtttcttccggccattctatgcctcatgaaattatcaacggcatccataagcccgaatctctggtcagaacctctctgccccataaaagcatgtatagcatcaaaaatgtcaggcatttgatgaaagtctcctgactgtgacgaaaaggtatggttatggttgggtgcaattcctcgcaactcatcaagttcttgtacaaatcctccatcacagtaagggcaaacaggatctctcccatcaagcacaattggctgtctgcatgcataacaccagtgtgttgctccacttgacatctttctttttaacaaaatttaatttgtaaaatctgcaccaaaattcaactttcattttttgtcaaatatactcgcacataatcagaaataaaaaagaattaattaatcaaaaaggcatgaagattcaatatgccaattggttatgctagtatcaatatgtatatcctaaacaccaccaacttagtaacacacaggaacaggttatctcaccaaaagtgagcgatggctatgtatatacataaaagcacattaaaccatcctattgcttaaatttggaccaggacaagtcaagagtcaagactaccatgatcagagaagctgttgctacagtgtcatctttggatcaaattatgaaacactagaacaaatttgatgagggaaatgatagcaacccatcctttgacacattttttacaatcaactgaaatttatcgggctcacaaaatgatgctggtctcaccttccatgtaatgactttcactaataatcctgtgaatttcaacaaactttaaccaatagaaattgtgttgcaagcacccttaatttcacaatccgatcacaaagtgcaaatcatcaattgaatgaacccattaaaccagatgctagacatcagtgctaaattacccaacacaacaatttgctcagacaaaaaaccatatatccggccatcaggacagcaaagaacaggtccaacagtaacaatagagggggaaatactctgtatattcatcataataaacaaattgaaatgaaatcaagttttcctaaaaggactatttgttttttttttatcaaaggtgaataaaggaataacaaaattcatgcaagatgcaaagataacttatcatgaatcataacctcggagacagtaacagtagagagaaggcataactaacccccaattgaaaattaagaagaaaacaaagaacttgtcaataaagcacaatttattttcatatggggtttcaatcaatcaatacccatatactccaatggccaaattaagctcgaaatcatacacaatcaaccgcaaaaataaaaataaaaaataaaaaactgaaaaaataaaataaaataattgcatgagagcagaaaggttcaggattcatcatagtgaacttaaaaaatgaaaaagacaaattaaaagcaagaactcggagcttagtaccgtaagattcttagagtgagggaaagagagagagaaagagagaagatgacctttctctgaggtttgttccactgacgaaaaagtctcgttatttttaccacttcagaatttatgactctttcttttatatcataaaataaagtaaaattcgtagtgggagaaaaaaaaaaaacttagtggaatttctaacacaaactatcggcagtttctaaggaataattattaaaacacgccatctttttaccgcgtttgatgcagaaatgcagtcacagaagttaccttcaaactttttgaatggaaactttaacaaaacacggaatagttattaattattatcatgtgtgttgttgggtagtttttgtgttattttgttatgaatttattaccctttttactgctcatatagttttagggatgagttggattttttttttaataagaattaattaaatagcgaatttagaataactcgagaaagtacgaattttctttctaccaaataccccttaaacataatttattttttcactttcgataaagtaaaaagtttctttttatgaaacgtctcctaaatgtatacattgatctagtatttattttagtttctttaattttatgtttttattttaaaaaaaattgaagtaattatatttagttttggttttgtaaaagattttattttaaatttttattcaaaatttgaaatcactatttttaatctttgatattcattttaagacagataaataatacaagaaaaatattatgaactgataatataaaaaaatcaattacaaattattatgtatcgtaagtttattaatcattaaattcaaacaaaatttaagcttaaatatatttttgatttttgtgtaattttgatttctaaaaaaattattgcacattttatcctcatatttttaatttttaacaattttaattcatcgttattctattaaacacataaacaattaatgaatgtagcatattactaacaaaataatacaaatttcaactttttgagatataaaaattaaattaattattttataaggtctaaaatcaaacttaactcattttatagtttataggaaataaaaacatatttaagttaaaatttaaataatacaaaaaataagtttaattttaaaattacaataaaacaaaacaaaataaaattaatactaatatatgcttaagtccatttttaatctctagtattacaaatgtgcaacttttgtgcttataaaaatttaattatatattcgatccttaatattttcaaaattaagcaattttattccaccattagttggtcatccaaaattagatggaaaatcaagatgtgtatgtgattaataaaatgcatgactatcttatttacataggaaataaaataatattaaaattaaaaattaaaaaattgttttatatattttgaaaatttaaaatataattatttgaaaatttatttgaaagaaataatttttaaaatatattaaagcaaattttatattttattttccatattattaattttttaatgtaaataagttaatcacacgtgttatttatcacggtcatattaatatttatcatttaattttgaatgcagattagtggtagattacaattattcaattttgaaaatcgtaaagactaaatgtgtaattaaatttttaatggaactaaaactacacactcacaaatatggaaataaaaaatgaatttaaactatttatttaatataaaataaacagatattacttgctattgccaataatatatcgagttagatcatcaacagctactttgcccatgctacatgttaaaaggcacgtttcctttattcctttttgacataatcgtcttttgaaattacctttttatatattttagtctttaacatttcaatttttttttttactaattcttaacattaaatatttatgtgttaattaagttttttaatataaaataacagtataaaaatttaaaacatatttttgtaaattaaaaaaagaaatttaaaaatcttaatgaacaaaatgcataacactttaatcttaatttttttatataatttctcttagatattctcttttaaaaatattcttatttgagacgcaatttgatatcaaaccttaactgtaggttatatgagactagcacgttccattaaattgaactcccgttagtttgtaatcttaatgattaaaaacgagagtttactcttttctttaaaaatatatattttactgacaattcactaaaatttaactatttttattaaaaatatttaaaaattaatttaaaatttgtgttgccatgtacgagagacagatcatagatgatataagtcaccgataagatcaattatgaatggatccaccaacataggaaggaccatggatatatgtatatactatatagcacgacaaggtgatggtgccctataattgcattagtcccaattgtttaagtttcccaactaactttatgtcacttataaataaatgtgactaaagacttctgatttggacatttgtttgacccgcaattaaagcattttttttatcttaactactttttcaatatgcatttctaaattctaatgttagtagacaaattgtttttaagattttatagatttgaatgaaaaaattgataggtaaaaatattatttttattgggtccatgatcaaatagtgttatgtttcataatacacacttactatgtaaggctacttcgttctgaatcctgatgcatcaagaaaataaaagtttgcgcggtttgttaatagtcgaggcaacttcttgttccaaacaaatgagagcaattatatttagttatcacaggcccccaaatgcaagatagtgctttaggacaatttaatgtcttgcaaagaattataactaatactatattttgatattttcttatttgaagttgagcaattgtttgaaagtagagcttcttactgaatttaattcctattctacatgttacaaaagtattagtcattgtaaagaagaaaaattattgttattaaaaaggaacatattatttttaagaaaaatatttttgactcttaatagtaatacatccactaagttaaataatatatttttatgctgacaaaataataacaattttttgctgaataagaacatcaataaagggtaatttagtcaagtaccattacattttctgaaattatggagggtcgatatcatctttcaccttttcaaacatcaaaattccaattattaaatactaaatcaaataaagttccaatcagaacaaatgaactttacaaaacaaaggtgataatgagaagacacgcaatgaatttggtaaagatcagtgttttgtaactgcagaagttaagtgaatggtaaaagttgaaactaattggctgaattgggtttgaacaggcaaagcaatcgttccattaaatatagtcaaaacaatcgaggctaacatgacaaaaaagttgatggaaattgtatttgaaatatacaaatgatcccttaatttatttagtatttactacaacaatatgtatgatatttcttggaatcaaatcaaaatttgtttgggtattgttgtaatagcggtggtggcaataatgattgttcggtggtgctgatgaagctaaggtcagcaaaattggcgttggtgaaggcatgcactcaaacgatggcatattcttggttggtttcgagaacccctaagcaccaataaatagcttgaaaagaaaatgatataattaatataacaagtcaaaaaccaaactggttttattctatacaccctgaagcacattcaatgaaattgacaggttttgagaaacttatcaaaatttaaatggaagcacatcgttcagttatctgaatcccataaatctaattcaagaaataatattcaaagttacatatcttaacatggatacttaataaatctatatctctttttattctcacaatttttccaacaaaaccaccattgaaaacacagacctaacatgaacgatgaaagaaagagtagcagactgatcagcctcttgaaaatggccaaactcaaaagtcaacaagaaaacttaaattttgttgaatgcaacaatgtcacagctctggatatactcgttgcatggctcaactgtcaagcgttcctcaacgagagtgtccacagatacaaggtcatccacaatagtcatcatgatctgcaacttcttgataccatatcccaccggaaccagtttggctgtaccaattgaaacaaacattttagataaaatataatttggaaagaagttaaatgcatcaaatatgcaagagaaaagtttatgaaaatttcatacatgctccccacaataaaccaggcatctcaatactgcggacaacctcttccagcttcttcatgtcggtctcatcgtcccaaggcttaacatcaagaaggacagaagacttgccacctataaatgtcaattaagtcatagtgtcaaacgctttcaacaaaaaaatatgatctagcgataagaaaatagtccacgtgagtgtatgaccagtcatcgtaaatttcaacctattactctaccatataacaagacattcctactttccccaaataactatgcaattttaggtggattagacaaattcatttatggcttctatcaatattatatttctgggaattgagaaatgtttcatggaccacaaattacaatttacagtcaggagactttaaagaaagcgtactctcttttttcttggcaggcttcttagcagcctccctttcctctgctgccttcttatcctcctctgtctcatcaccaaagagatcaagatcatcatcatcttcttcagcagtggcagcctgacaaattcaaacaaatcccaatgatcaaattagttgaattagttcacttagcagcttcagtacaaccacaataatatcttacacttcacaataagtatatctgtacactataaagtcaaaagtctatttatataattttacaatacaagtacttccattcatttcaatattattatcttagataacaacaatttcacttagtaatcacatcatgatgaattcaatcaaaactactactactctgcatgggatataaaacttaagtaactatctcaagtcaaaagcaaattatagtgttattcaactctaaaatgtgccttcgatgttgtaatcttggctaatacttatcgtgttcaggaactatatagtaaacattttatgttacatatgaatatggttacataatcaagctctgttctttctaaaactatcaaagtacttagtgttaggtgttcgcccaaatggattaattgatttcaaattcacatcttataaaagaaacagatgctaaatgagtaaattatggaagcatttttctgaaaagaaaataacactctaattgctttgtcttctatttcaactgcaaatctaaggttttaacttttcacttaattatgtaaacatgttttctctttttgtcagagtgatagttttaaatttagcatgttacaggatcaaaatattgaaagataaaaataagaggtgtgatgcagtttataatttttaaggcatactatgaaatttttataattttttaataccagttcatccagtcattggttcaatcagtgatcaagtgccctgaactagtctagtgggatcatgactgggactgattgcataaaatttaaatgcagaaaatccagatcaaaaatcacacacacacacacacatatagaaagagagagacaatggttgtcagcatcctccatttcttttagaccaagattagtcatgatcctgcagctcaagtttctttaatttatatttcatttatgaagtttgaaaaacaaaatagccagtaaagattctactttcacacactgattgcaggcaatctccaattcctatctcttacatgaactaactggaaccaaattgcctgcagtcagaacagtcactgcaagtgcaaggtcctgcagtcataatccaatggcttaaatttttttagcatacatttatcaacctttttaatgagggcgagccctgacacagcggtaaagttgtgtcttgttgacttgttggtcatgggtttaaatccgaaaacagcctctttgcatatgcaagggtaaggctacatacaatatccttcccctttacctgtgtatagcgtggagtctccggacaatggggtacatagtaaacatttatcaacctttttaatgtatgaaaataaacttaacatttctactgagctactcattcccatatctccctcataatagcaatatgcatggcaatcaatctcccccacacagtcacacactaattaagataagataaggcttttgctattagtttcatattaagtattaacagcaaatcccatgtaactttcacatattttaaatttttaatataaattaaaagtctagctatcgagcgccctaaattactaaaaaaagacaaatactaaatgacatatacatgcattttcaatataacaaacgacttaaaaataaggcaacaacaaaatataaaattaaggaaaaagcataccgctttggcaggtgcagcttcagttggagcagcagcgccactgaatctaaccccttgagcgtgcccagggaagctactcaaataaaaatcgaaattaacaaaaatcaaaattcgcaaaatctaataaagaaaaacaaaactataatttgcagcaggaaaaaagaaaacaagtgagagaggaacaaaccttggagcaagttgagaagagacagcatcgtaccacttggcagcattgggaaaagagtcttctcctggcttttccacaacagctgcatacactttgacatcatcctttgtcaattgatccctgaactcgaaaacccatatacagattcaataaagcaaatgtcagaaacagtaaaaaaaaatcaattttttcccataaaaattgagttgatgttatgagtgttacccagagatataggttttcccagaaaggaattgatcgagggatttgatgccctcttcggtgtgtagatctgagaaggtgacagccattagtgtgattgaagaggggcagtactgagtagtagtgagtgcagagtgagtgaaaaagagacactccttcgatgctcaataatttatatttatagcatgtacagtcacaaaccctagatcagtccccaattctctattccgaactcaaattcacgttccagacccactttaggaaaaacaaatttctgttttaaaatctaaagtgatttatggagtttattttattttgttttttttacttcagtaatatcatttttaaagtttaattttcccctaaatagcatattatatcaattataaaataattataatgagtttattgtaattgttattttgaatatgacataaaataaggaagctaagtagatgacttgatacattttgattctttaagtttttatttttttctcataattttcttagtgtcttgattataattaagcaattaactattattttagcttttgaaatgtacatgataaatatttgttttatataacaaaatttatgataaatgagtaatttaaaatatttaattctatatgaagaatattctttttaagaaatattaaatctaatttaaaaatgaacatgaaaataatacaaaaaaaagagataaataatagcatttcttgggggccttgaatgaaggaaaataacctattgatgaaccggattggctaacctaatccacctaaaataataacttattgctattttctaatattttttaagactttaaagtgttttgttcaattaattagaaataaagtaaaatcacctaaaatatacttttagtatattgtaatattttttaatattattttatttagtgttttgttcaacactatttttaatttttttttattatagttccatgcttgtagcctatgatgatatatcttgttgtggtgggtgaatagtgaaagatttaatataactaatatttttctaagttattcaaatttatttttttaaagaaaatcttttttagttttcttaaaaaaaaatttaattttttttaaatagattgatggaccaactcatttaactcacaatttgtggtggtccaactaaaccactttttttaaaaattaactttaactagatttagttgaattggtccatttcctaaatgggtagaaatgacctgggtttaacatgatgaaacagtccattttgacaagaaaatctttaatataattttaagtagtgttattaaaacttcggtttaatcattgatccggtcgaggtagtggatcagtgagttagtggtacaaccgataggttagtaattgaatcggttttatccggcatatattaaaattttaaaattatagatgtatctattatatataagtatataactaacattatttgagtaagaaaagttcattcatactccaaaattcaaaaaaactattaataataataaataaaaaataaaaaaatcccaaaaaaaatccaaccaggccagaccggttcgaccgatcgattttggcatgtttgaccgggtcaactgcagaatcggtccaatagtagaatccaaggttatcagaatcgcgattctacatagaatcgtggaggcctcgtaaaatcaaatcgtaagagtctacttcaaacaaaaaaaattacctatatatgaatatgaaacaatgacataactatttttgtcaaattaaacaattgcaattataaataagagatactaaaaaattcaaaataacaattgaagtattaaatttgataaaacaagtaaagtgtattaataaaaaaaagtgtgtaaatagaaattacttaaattaaaataaaactccagtttttaatataaaaaaatgaatcagaaggtgtatagtaagaaaaaagaggtttaggaagcaaatctgttgtggatctggtccaaatacaaaaaaaattactatttgaaacaacgtcgttcctaaatccagtagactcgcgaaaacgtagtagaatcaagattctacttagaattgagcaattctacgtaatatcgtgcgattctactccgaaaaagagtttacgtccgatttaacttgtagaggggtagtagactcgtaaaatcggacgattctatgatttaaattgagagcttgataaccatggtagaaccggaccgattgtgctaccgattctcggtccatccggttcgaaggccgatccgatccgattttaataactatgattttaagtgtgtttgtttagcatcaaactagcattaggacccgtgcgcatacgcacgggacggctccgtttcgctccgccgtgctatgctagatttgcataaaatatttttaatgtttaatgattaagaattattgtataagcaaacttaaaaattgaaagtaaaagataaattgctaaatgtatcagctaataataaattaaggactccactaagaaatgaaaagtgtttcattatagtgtttgaggaatggaataaataagcactgatgtatcacaccaaattttactatcaagatttaaggtgaatggataaatagtagacgacttgatatagtgagttaataataatttactctaataaagcaagcatcaaaatgctttcttacaagtccagaatgcaaattcttacaaaatataattgttaagtgctttaagcataataagaatacaaactattcaaaatataagatgaagtcataattacaagaacaaaacatggttttcaacaaagagtttacatttgatagagttaagacaaaaagtgtctctaacaaatataccagaacacatggttgctgctgtgatcaggaaactcaattacaaactacatatgtggtttgaaactgttgtctcttgcaaataatttccatccagagctgattttaacatatttgcgtgaatggttgaacacaattttgcatgtcttggtttcattaaaaacaatatttgtgaatgttgtcttaattaagaaatcatacatgtttctaggtagatgctgcaaaatacattatggaatgttataatttgatatatgcatataattcactataatattaaaattatatagaatgtaagttaaaaaaagcttaccaaggcattggaattgagatggtgattgaccaagaaaatgtgaaagacaatggcgttaggatttgatttgtaaagagaatgtcattgtggaaatgattgtggtagggaattgcttttgaaaacagtaataaaaaaatagagaattgtcatacaaataacattgtccattcaacatttgtaatggttcaacagattatactaaactgataatgtcgattacaaagacaacaaaaacaaaataattttaatatttatatgtattataacaaaaaaattatttatgacattattgataaagtaatttaaattaattcattttcattatcttataacaaataatcaaacttattacttattatttttctaataaatatattaactaattgttactctgttagttatcgtaataattgaattaaataaagagtttaaaaatttcaaatcttaattaaattttagatagaataattattttcggtaaatgacaattgtagtttctatcattaaaaaataaaattaaaactaatttacattatgatatatgattaagtaatttaaaattttttgtaacaaaaattatttttataaattaattttatttttatctctatcataacttgaaaaaatttatttataatattattgataaattaatttaaattaattaactttgattgtcttataacaaagaatataattattattttctaataaatatattaactaattgttattatgctgattattgtaacaattgaattaaataaaagttttaaaattttaaatattgtttaaatttacctttttattttatatgatcaaattttaaatccaaataatatatttaataaaaataaatattgttgattgtttgatatgtaactgtactaaatactttttaaaaaaaaaactattttcccatagaggttaactcatgatgacatagagaataattatttactgtaaatagtaattgtagtttcgatcataaaaaaataaaatgaaaatcaatttacattatgatatagtgaataagtaatataaaactttattataacaaaaataaaattattgttttattaagaacttaaaaaaacaaacaaaactataacttggagtatttcttttaaaaatcaatttcgattatgtgattattttgtttcactatttattcattgttcaaggtttttgaaacttaaagaaacaaacaacatcataacttggagttcttttattttaaaaaaattatatttagataatgtgattatgtttttgttatagttgggttacaatccttcagatgaggtgggtacaggagtttaaattactttatcccaaattatatattatttaatattgttgattgtttgatatgtaattgtattaaatattttttaacaaaaagtttttcctgtaacgatttgctcatgatggcccaacgaataatcatttcccataaatgataattatagtttctatcagaaaaatatgaaattaaaactaattacattatgatatggtgaataagtaatttaaaactttcttgtaacaaaaatcatttttataaattaattttaatttttatgtctatcataaccaaaaaaatatttactatgatattattgataaactaatttaacttaattaattttgtcttataactaagaatcaaattattattttctaataaatatagtaactaaatattattatgttgattattataataattgaattaaataaaaagagttaaaaaatttcaaatgttgataaaatttaaataataaaactataaatatttttattattttaaaatatcatcatttcattttactgttatttatccattattttatatgatgaaaatgtaagaacaaatagtatatttttaaaaaaaatattgctgattgtttgatatataactctgttaattttttttttaaatattttttctccttcacttataaagacatagagaataaccatttcctataaatgattattgtaatttttaatataaaaaataaaattaaaactaatttaaattataatatagtgaataactaaattaaaattttcttgtaacaattttttttataaattatttttaatatttaaatcaaaactataactataactttaaaatttttagtatttataaattattttcttacaataagtaattttaaataataaaactataacttttttttttaaaatgtcaccatttcattctattattatttacccactattttatatgatgaaaatttaaaaacaaataatatatttaataaaataaatattgttgatttttctatatgtgattgtgttaaacattttaaaaaaaaatttcgtaacgatttgttcatgatggtccaacgaataataattttccataaataataattatagtttctatcataaaaaataaaataaaaattaatttacattatgatatagtgaataagtaatttaaaattttgttgtaacaaattatttttataagttaattataatttttatttctatgataactaaaaatattttatttatgatgttagtggtaaagtaatttattatgattaaccttagttgtccaataacatcgaaacaaactataattttctaataaatatattaacttaatgtaagaattgaattaaataaaaattataaaattccaaaatcttgattaaatttaaataattaaactttaaattattatttttaaaaaaacatcaccactttattttacagttatctaaccattattttatatgataaaaatttgaaaacaaataatacattgaataaaaataaatattattgattgtttaatatataactattttaattacttttttaaaacaaactttttccccatagttcacaaagtgtattagtctcaaaatacttactgattggacaccaaggtggcctagccgtgatgattaaaactttgagtgcatgataaaaaatcataaaatataagtatttaacatatttatattaaatcaaatacaattcatttggtaggaacaaataattatcaaacagaagaaaatagttgattgtttaaaaacgaaaagacaaagatatgatgaaaatttaaaaataaataataaataatatatttaataaaaataaatatttttgattatttgatatataattatgttacataatttgttaaaaataatcctgtaactatttatccatgatgtcctataaaataattatttttcataaatgataattatagtttttatcattaaaaaatgaaattaaaattaatttacattataatgtagtgaataaataatttaaaattttttggtaacaaattttataaattaattataatttgtatctatataataactaaaaatatttataattgtgatattattgataaagtaatgccttttaattaactttgatttttctataacaaagaatcaaatatatattttctaataaatacattaactaaatattattatgcaagttattgtaacaattaaaataataaaaagagtttaaatattacttaagagcatgatgtttagccggaacaaagatagagtgaaactaatattgtccgctgtataagtatgccttaaatacattcatgtataaaagaaacaataatccatcatgattatagaaacaatattgtctcttttacattatccaaatatttagcaaagtatgccttaacccagttctttactatccatcactatctgtacgaacacaatgagtcaaagtcaaaatacacattttactgcatttttacaatattgtttgttgcatatggtgacaagattcagtcacaaattgtataagccctaaatacattcacgtataaaagaaacaataatccatcatgattatagttcgggattgtaaagctatcagtttctagtcattattatctagcataaaatatttatactaaatcaaagccctggtcagaagagtaacaaatgttacagcaccatagtcaatatgtatttagacattacggaaagacacaaaccattcatttctttaagagcagtatcaagatcagaaggactggcaaagctcacaaatccataaccttttgttttaccagtctgcttgtctctgacaacctagtcaagataaacataccttaatcacaacattgtcaacacattacaaggaaataaatgcaccacaaacacataaataataaacattaagtttgcttagagataagcagacgactataaacctcaagttctttagatggtattaaatgtctccactattgaataatatgccttcatatttccatcaaataacttggatcttgtcactaatttcttagtctcgatgaatgggaactactaaatacatatttattttgtaaataatggacatacataagcaaactataaaacatatgctgatttagcttttaatttccactatctaatataacatccaaattattcattagcacaaaaattctagaaggtagagaaatggtctcgactcttgaccgaatagtaagtcaatactttatagacaaagttattactaatttttcagttcatattttcaataactatttaacctattttctcattccaagagaattaaaaaaatacactgttatctctggctaacatgcaaaagtattgtgcagccctccctcttgggtgggaactttcccaagccaaatttcaaagtcactttcatagtccattattttcacccacaaacttatccttatatattgttgaaagaattgcagttagtgacattagcttcttctttaaaattactatgtgtctagacttataccccaaaaaatacaaaggttgaaagaggttggagaattgaagtgacgcaataagagaaagaatatttcgaatggtgaatacaaaattcatggttagtgaaagatcattatcatttacaacaatggttgagggatcattatcatgaacatgatcttttagtgaacctgcccttttctctggctgttcagttagtagtgtcatcaatctagagtctacactaattcatgatgttgttgaaacataaattttatcattgaagtcacatttaagaaaattcacttacaaaagttgtattgtgtgctaaagcttggctcagcaaaatgatctattttctaatatatttttcacaaatatctcatagttgaagattgtgtcaaattcgaacaatgaaatgtaattgaaagcataaatgttatccaatcaataatttataattggcactaatagttagcacatgtttacatttgatatatgaaataagattttgtttgcttataattgttcttaattctgatcgattaactattgactggagatgactaaaaggaataagtacccggcaaggtagagatcgttcaccaagggacaaaagaaggtgggtaaattcagcctcagcctcagcctcaacagaagttgccttaccttgacatactaacatctttagttgacatgccaatttctagaaatatggtcttgcgtttatttacttcatcagataattatttcttatttgcagccaattttcctgaacatagtgtagcatcagaaaaaaagcccactttaagtattaagaagatataagtattaagaagaaagatatacgtcatgatgcccttcatttcagcctatgttactattctaaagaacactatattgtggcaataaataatatcacagaaaacatgacaaatgtttcaattgatatttcaccggtgaaatttggcaaacctactatcttgaagaccttcttgaaaacaatgcacaaaaactcctgaacatgtaatacttaagaagtaaacatttctatttataaataactttataaataattcaagaacacatgtaatgtaaatgaccatgctacctcattcgaatggtctctgaagtccaaatttcgtaagagatgcatagagaagagacaaagataggtaaatgctaaggattgctaaccattctacctagactttattgaataattgtattgtatataaaatgaataaaatgcttgaagtggacatctcagtctaaccttgtcaaacatcacccagacaccaacttcagaaaaatgcagatggaattgagaagtatgagagtaaattgaatcacataccagatgcccccaatagtattaaaaaaaaaaaaagagttccttttcagaaacataatcagtttcataatcaagtaaaagaagcatgatgtgggtttagggtttagggtttagggtccttctataagtatattgatagataatagatataatcaaattatattacctcatccttgttgccagacaatgccttagccaatgcgttaacttcaataattttttgggcagcaaatgctagccatgactcttcaatgcagcagcctaagaggaaagaatagaagccatgagtaacagcataataaattttacaacatatcgaagttaacaaaaagggaagttgaaataagcacccacaaccttctgaacagcctcgttggtcactcttggagaggacttccttgaagcctgagctgcagcattagcagagaagaaggcctgaaaatgaaaccataagatatttttcattagtgaatcgtgtgatgaaacaaataggaatttgcatattttattgtcatggttccaaaattaatcaggaattttaatcaggaaattgcatatttataattacctttcaaatttcaattggctagtaatagaacaatagcaataatgtcatgtaaaaggaaattcaccttggggttttgaccaaaacaatgcatttatgtaattcacatcctcttttgatactccagactgagctaatgccttttcaatgcacagtataacaccagcccctgttttgaggtggaataaagaaggcataagcacaagtgtaagcctggaatgatctgcagggacacatagctatattctaaacaaagcacataattattaaaaagctatatcaacatgagccagaataaaaaacattcactccagaaccataatgaaaatgtggcagggtgtatatagttaatctctttgattatactgcaattgtcatgataaaagtagatatatcaatgattcagtttgtgattgaaagaaaagaagcaacttgcagaagcaacttgcagtcgtagtgacacaaccaacctgtagtagaaaaatagctgaaaaaggtttactttgatgaattttcacagctatcatctcatataggaagcaaaaaaatcaaaggagatacaaaagcgggttaaattaaacaaacgcattatattcaaattcaagccatgaaaactcacaattcactcatacataccttaacaatgtcagatgatagagtaaatctctgaaatactctcgcacccatcaaccatataatcctatcacaaaacaccacaacgttagataaaagcactgcaccaacagtgcatcttcagataatggcataacactcagcattaaaagcacaagcagcccttcaaaactaaatctaagtattttctcttaatctaaaagctctaatgtaaaagctcttatgtaacattgcttgcaactgatgagcgtgatacggtatctactgccaaggtgtgatataaacaaaaaaaatgaagcttgttgaatataaatcggaaataccaaaccacaaaattaaaaaataatgattcacagagcaaggattgtccatatgttcatatttgtcaaataccaaaccacaaaattaaaaaataaaatgaagcttgttataaagaaatataaagttcattcatgcatttgatcaaacacatcacttgcatactacaaatgagaccaatcaaactttaaaaacacaatatcattcagaaatgaaataaaagcaaagcttgatattaaaaaacacaatgtcaccaacaatatcattttaaaaaacacaatatcacaaacaattcacatgcatatataagctctaatgtcttgattttaaattctaacagcaaaataaaataaaaaataaatattgaagaaaaaaaaatagaaagagacaccttgtgctctcggctttctctatcttcattgacttcctccttgctagattctttcaaatgcgtgttgcagaacatgagtcctctgtcacaatcttcttgtcttctctatggattttgtgttacatcacaagcagccattatttatttagtatgtaagacttaccaccagccattatagtagaaattcactgttattatattaaattgttaatactggaagatcatagagaaagatgaaataaaatagctaatataagagagaacagaattccgtgaaaccaaatcatttttcttgaaaagaactaatataagaaatacaaaaaattaatatcttgaccaaaagaaataaaatgccgcgagatcatgcaaataactttattgcaaaactaattttgggattcaagaatgagacaaaaaatagaaaggcctctgattgattaaatattaaaccttgtcccgttatctgcctgctaaatccacagctttttccacaaaatcagagccctatattgatgcacaaagagtatgatcaagtgcataaaaatactaatcaaaactttaaaatgaaagggaacttaccatgtttgtgaaaagtgaagtcatcatggaccggattacaaataaagaaaaaggagtggcaatcctcttaattaaggaaagtctgatcgaaggaatcatatacttattttctcaaacttatggttcaacttgtcaccattgtgaaataatgagtcacgcacctgacagatatacctgcctcaccttgccatgtcttacctaaaggttagacttatttggagtataacttgagttttcgttaataattaacattgtaaatgaaaaaaggtaaaaaaaattattattatcctaacataaagacatatagatatcagactcaaatccaatctcttattaccatcatgaaaaacatatgaaaaacttaagtgaagagattctgcaatccacataattacacagtaaagttctcaatcaaataaaaagcactaaaatcaatcatacccagattacaaaattccatcctgttagtctaagactctaaagcatgcaactgatcctatctaagccactatagcatgagcatgtggagttatgagcaggttcatagttaattatggaagcaacatcaagatacttaaatggatcctttggcaattgagaggtaacagctaatacaatgtagtcatgttgttttaaagccaaccacttaaatttgtttcatctgaaataatggaaataattaaagattcaattccaaataataatcacacaaccattaaatttttctacccctcccaaaaatattgtggtagtttctataatgtgcactgcagtttctatagtgtttcatatctttacggcaagtgttacaatataaacccgcaaagaatcagcagtacattatcaaacaattcctaacttgaagttaacttagcaatttgataaagaagatcaaaatcccaattccaaaattagggtccacactcattctagccattatttattcagaattcaaactgatatgctacagaaatagaagcttgggcatccatataaatgagagaaaaacctgaatgttgcaagttctttgcttttgctcacagacttatgttgcccatacctaacataataactcaagatattagaatataatttaacaaaataaattgtgttaattagttaagttaccttgatggagtgcttgcgtttccagagcctcagtaatggactgaaatattatccacgtgcgaacaaaataaaagaacattaaaatagatccagaaaccgaaactaaaatcgaaccatcatagccaattgaagaacattaaaatacctgttgcaatatacaataaagcttataaacaaaacaatagaaatttgagtgagacattctgtcaaacacttcataagcaaaacacattttgcaaaatacccaaataaaaaaatgcaaagaaaacatacccaaaacgtgaaaaaaaaaaacgcaaactttgtaaatataagaggtataagacagagaagaagaaaatagagaagagaagagaagaaaaaacaaaggcaacgcgacgtggtagtggtctacctcgccgccagccttaatttcatttgaaggcaacgcgacggcggtcggagatggcggcgcaacgatggactggaatggacggagaggaagaaagaaagaaaaggaagaaaatttttgagagagagacagagaaggaatgtagaagaggagatttgagagaggctgagtttgaattcgaatttcaaatttgaaatttttgtgtaggctgaagctgcagcttttcaattcaaattttaaaaatgaccagcttttcactgatggtggtggacgtgctgttttgtgaaggaagagtaaataattagctgaggaaaaaaaaatacaaaaagcctctattttttaagagagtgacacgtaagattttgatgaggtgtcaatgaaataaaaggccacgtttgcttagcttggtattcttttaatataatgtattgatttgttccaaattcatccagcaataaaacagtgtagaatcaaatcttgcatattagtacaaccacatacttcaaatttcagttgcccttttattacgagttcccacttcacatatcgctatttgtttatacgttatgcctacacgtcatcacaactttgttctactttctaagaaaaacacatgtaccatatgtggcagctccatgacaaaatgattgaaagagaacaaatagaagtaatgaaataataacatgaaaatacttaatctacatggcaatgcttagtaatttcgttacttaaccaggaaaaatcattcgttctcatcgaaagctatagagcaatgagcttagattttgccaaagcagaaccattaagaccaatcccgaataaccatttttaaggggttacttaggatacttgataagcacaagaaatcctatcttaagatattattactcattgacaaaatcactttggacacacactcttcaacacaaagtctcgttgggaaactcatactttaataagctgctagaacttacttttgttacacaatttccttgaaccacttgtgtaataaaaagttggagttccttaataaggtatattgaagtcattgacatggaaggtggttgtgatccatgatgcatctagagcaatcaatgttaaaatctttgaatggtctctacatggcttgttacttgtgccaggagatatgctcacactaattgcagtcatgcaccaagttattactcccagtaagtcatcttctctctttttggttttaaaatttgtttgctagaacaattctacgctactcaacaatcagtttctcatccaatatctattaaatgttgaaaactgtttctaaaacaagtgtcttaaaatccaaaaactacttaagtgatgctttctcatattcttctattttcatcttgttcaacttctgcatcaattctacactcttttgtgccttgcaccacttactaccagctgctaatttgaacaatttttttagttgtattttgaaaactaaaaatagtttagaaaatagaaatcaaatacacacttattttagtcatcctctcaaaatcattttatgaagaaagaaaatggaaaataaaagaacaatatgtcaataagatttgtgctgagtaacctgattgcaaactttggtccgaagatattaatttcactaatcaatccaattattggttccctttacatctattttgttgtagtgggttacaaaagcagtgtagacagcaggttaatgtttggagctagccagaagatgattgaggcacaagctgccaggaagaaggaagagtatctgaacaatccggagcttggtcggatttttaaactatacaaatcagaaaaggtcgtataaatactagttaataacattttctttattttagcttataaaaaagaagattttatctattttgttttcaccatgaactttacattgttatctgaccattagaaaacataaaatatgacttgcatattgactagtaaatatttaaaagatataattagactagaaaatgtttttaagaacacatgtttcctaatttcaacttatatgttggcattcctatcccttacctaacttttttttcttcccttcaataccatgttctgtgattagagttacttgtgagctgacttctttggacatgatactagaagatgtcctgataaatttctctacggcagtaagcttaatccttattatactctattacatatatggtgaatatactatttctactccaaaatctcaatgcaacttaatcatgtaaaaatacgaaaaaggtgtgctaaatatattggtgatattttctatgtggttggagggggttataatatcaaaagcatactcagcaatttggtacaaagtagttgtttctacgaagtattgagttagcagtgatccaaaagatatttgttttagtacattctaacttccaactgttaaatcaaagtattcaagattccacaatgtggatattgttgtcaagagtttcccacaggaatgagtatgcattattcacaaaaacgtaagtcactgttttgcttgtgaacttgtataaagtgtaaccagatgacaaagtgaaacgatataaaaaataagagcaggagaagaacaaaaacagatctccctatttctattattttcattattgcaactaatacaactcgttactcatctagataaacaattttacgttttgataaaaaccagcgacaaaatctacttgtgttgcctaccaggcaaaatgaattttatgtatttaagatttaccaaattataaagaatccctgcactcctagtacgaaaacaaaatcatttccattgttgacagtattatggttatgactaaaagcgctaagaaaatagtagacaacactcttctacaacttgtagtttcaggctgtgaaccgacaagtatttctccaaattattgcagatcaaaaatacaatcttctaatgtaagattatatcaaacatacatacactaaacataggtcttgaatgatctacacatctgcttctccaaagtacaattaacattcaataatttaagctgaatagaaacaatagtttggaactgtgcttctccaaaatttgaagtacaattagtactccttgtaacattgtttctcaaaagtacaattaacatttataaacagaaataattgacgaaatcattcaatgatttaagctgttgttttatttattcctctatagttctaccacacatgttttgctcaagataagaaatcattttaagagaactagacctgctgtttttccatcttatgaaacttttcacatcatattctcaggttaggtttaagatagaaacggctgcaggatcatcactgaagacggttgcattgaaatcagccatgaagcaaaaggcaacttggcttatactggacaggtcaaatgaaattaaattgattatctgaattatcttagtctcatggatggactaccaaaaacatgtcaaattctacactgactaggcatgcaagaatgatataaatttagggatattcgtgggtcggttcggatcggtttgggccaaatttaggacccaacccaatcaaaattgatcggttcggttcggtttgattttcagaagaaaaaatttgaaacctaacccaacccaacccgttcatgaacagttcggttcggttcgattcggatcaccgggttacccatttaattttttttagaactactattttatatcacgattctttcaaatatcccatacaattaacacaatattatcaaatgtatgaaagtagtaaaattgattcatttaataccatcaacataatattctaaaatagacttataatataaattaaaataaaatatttttgaacaagatttactataatagtctgaattacaacggtttcttacaaaccaagctttgttataaccaattttattgcaacaagatttgctgaaacaaacaaataaacaaaatatgattcattagtattataaacatggtaaacaaaatatgtaaaaaaaggtcataaccttaaatcaattcttatttcaaaacaatatactgttagtaccttagttctaataaaattttccattattttgatttcagctacttaaagttttaaagtagggaacataactcaaatgtctaaaatacaaggtcctaaacagttactgagtgccatgatttatttatataaaattgtgtatggtcaatttaagtcaattgagaacttttttaatattgaaaattatttcatttggtccaatttttagaagcaatcgagaacttttttaattataaaagtttgctattaaaacttctattacatatgaatattgtgttggtcccagatgaactcaagaggggtgaattgagttttataaaataattaataatttaaaatcaaactcaaagcaataatatgaagataagagataaagaagacacaatcaattttaacgtggaaaatccaattgagtaaaaaccacgacgtctaaattggataatcaatccaatggacaactccactttgataattttgtgtacaagagttcctagtatcctagtttcctagtctacccttaaacaacaattatcccaactggtatccttgtttctcagcaaaaagttctattctcaattcatcaagaatagagacagactaatatccctgttttccagccaaactggtatcctagttttccagccagaagtcacacgtctcaattcatcaagaacagagatcctagttttccagctgcgactttttccaaagtcaagaaaaataatacaataaaatagttaccaacgcttttattccttaagcaaataggtacctttaaatcctgatggagagttgaagaatcagacttgtcaaacgtttctatatgatttcacaacaattctctcaatgatgtaaacataaactctctaaaactctaatattatttggaatggaatgcatacatgaacactaaaatatgtttttatttatagtaatttaaagatatgattttaaccaatttttgaatgcaatcctaaatatattctatcatattatccaatgcagtcttaaagatattttattatattatgcaatgcaatcttaaaaatattctatcctatttttgaatgcaatcttaaacatttaagataccatacctttttttatggtcaaattatttttttaatttttaatatatatatatatataaataataaaatatatattattattacgggtcacagatcgggtcatcgggtcaacggatatataaatctaaacccgtgacccaacccgtacatgaatggttttgatcggttcggttcaattttgatccaaatatataaataacccaacccacagtgttcggatcggtttggatcagttcgggttcacgaatgactcgtacccgtgaacacccctagatatatttcttttgaaacccttcatttgaagactattcaagttaaaacaaacagataatctaataaaatccattaactaaggtctatggggcataatgtctaagcaagtcataccttcctactaaaagaactcttagatttgggcattacttacaaatcaatcaccttttacaatttcaagtattctgtttctaactcacagcaagatcacaacataattctgacatataatttcttttagtcaaaatctattatatatcaatctaaatcattcaggctagctactcactcaagcaatagcaagttaggccttgcaatacaactgcttaaattgaagtatacattgaacaaaaagaagaaagacaaaatgatagataacttatgaattagtctacgtaggtgaagttgaattgggatgttttcatttagttatgggtatttgtaccagtttattaaataacatagttacaaattttttttgaaaattatacactggttgaaaccaaatctatataaatacatacatgtagtccagcattctcaaatttaagagctagaaattatttcaggatgcaggtaactacaaatatacctttcttttgcttaaacaatgaaataagatgacaaacaatgtaactatttcaagtgcaaaatcgtaacccatttttagtgaattatctaactacaacctcatattaatgtaagatgcatctgggtggtcacaggaaaatgaagaatgatgagaagtattttctccagaagctttcttgtggtatattaagagtaaggcgtttcaataaaattgtacgtttaagagaaccactacatctccaccaagaaacgcgacccggtagcacccatgaaacatacacagatagtataccactaccagatacttcaactgaacatgatctttacctcttcagcactgagacttcccccaacagtaagtactagaatacttttagatttaacatctattcataatataaccatgtgatctttatcggctccaatattttcaattgttttcatttttgcatttcacatgtgggttagcattagatatgctttgttttattgcatgtttctcctcctgaccctcagcatctaaaatgataggtcaaggaagagataatcaaatgaaccaggaacaaggacaaaccctaaagagcctccatgttgaagaagggttctcaactcctgatcagccgagcatagaagaaaaagacaatagtataaagcacatggaaagtcgaacacaaagaagccaaaactggcaggatgaagaacaaaaagaaagcatgaaccatggaaacaaaacagaaaagcttatgcaccaaggcgtatcagaaaggtggggaaagatgctcatcttttggtggagctagaaacttttatcttggaggggctgaagaatacagtgtgaacagtttttttactttgagtaattttcatgtgagaaactagtttcaaagtcatacccatgtatattatttacacattagcagtttttgtgtcaatctatcttattcctctttggtcacatccacaatatgatggtaagattagctaatgtggatcactatctgtcttaattcatagagtaataatagtgctaaatattattggtttttatttcacaaaatgataactaatactggattttagcaaaatctacattctcctaaatcatcaatctaattattaaatcgtatctactatctagtgactagtgttcttgaaatccatgcatttaaacactttggtgtacatgaaacctatgcctaaacaccctatgaatcaacacatcactcttgaacaaaaaggtaacagcatagcagaattcttctacttctcagtatcaataaagtattattcttgttgagcagctacacgatcttcttcactatcaacgcgtaccccatctttgttattggtaatatgccatcttggttgcatttgcaaatgttttgatagatcagtagccgtctcttcatctgcattgaaacaacctttgctctcttcaatagatgagttagagtgagaactatgcttatgatcagggggagagaagatagaggagggtgaatgcccttccaattcctatcagaatgggatctcatgtgtccgtagaaggacttataggatggaaatgatgccattgccattagagttattattctaatacggatagattctcttatagaatggatttgttataacaatcatatctttatgttatagatatagaatatgttaggtttgttatggttataggatatgttatctgttataacaatcatatctttatgttatagatatagaatttgttagttgggtttgttattttgttagcagaatttaaactctatataagaatataggatgttgggtttgttattttgttagcaaaatttctactcatgtaaactctatataagacttttttgtcgcttaattcaataatgaagaaaatacacaaaagcataaaatctcatgatgctttcctttgagcttgaaagtgaaatcttttgtggccccctaatgctttgccagagctaaacttcttgccacaaaattcacactggcgtgttgctgtagcttagttagctagtttctcatgtgtcccagcttgatcatcatcagcctgcatgtggtttatcaccatcttcacataactcaaaatgtgaattactcatcttctctatttttttcaataagatatcatcaattcatcatcagcttcccttggagaaaaataaaataaactaaaaagatggaaaaagaaataagctatgagcctactactactaaggaaggaaacaacatgaaagagcataacttgataaacgagaagaagagagagaagataggatactaggatcacaatgataatggaaaatattttgaaagcaattacatggtattactttttcaagataacatattttgattgaaaatatatctttaattatcaatttatcaaagtcaatttagctatttatcgagtttgttaatgttttttaatcaccttaagattgctagcttcatggtgaaatttcgaagtattccctaaactttcataaagtaacattttaaatatttaatatttcccaaaattaataatataatttatcttaattatcttagcttagttaaaatataattgtaattaatcaaaatatagtaaacaagcacaaaatatactaatcccctttcaaaatagtctttatattattagtatttttactaaaattttaattaatatactatagtaattttatttaaaagatcaactccacataaaattaaaagaccagttgcatagtggagaaacgccaaagaaaggggacataagatataaaatatcattattattaaacaacatatagcttaggagattaaagcacatagaataatagaagacagtaaattaaatatatgcaaacaaaaattaattcagctgataagaattgatcgaactcatatcttataaaatatgaaatcaatttttgcaaccgaagacatctttagtacataatttgtgagtgttttttaagttttgagattagtcacccagaaccaacttatatgcattacactgagttactcgataaatatataacactgaatacacccttataaaggagttgctgtaaacattaaaaaaaaaaagggtcatctatacaatctcagaaaaataaagaatattcatgattcataacaatcaatgactcccctaagaataaaataaagaatgaaactataagagtaataagacaatattattattattattattattattattattattattattattataataataataataataataataattattattattattattatgagccagaagaatatgtagctgttctgtcactcatgatggagccttgaaaaagataagcctccaccagagtgaaaccccgcagctttattaatagctcttacaaaattctgcaatttaagaataattatatattagtgtggaaaaaaggggtagataatgctgtataaagtatccttaagagcatcttgatccttgtcataatcctctaccggactagagtcacctaaagtatcttggtttatctggtctgaattttctttgtttcccaaacttgactctcctttcatggaacaatcatctgatccttccacaatctttggtggtgggcaaaatatggattccaaaaacccattgctgcgtggagaacgtggttcatagtgctgatcatgagtctcagtcggaggatcctctctcactctcaatgagtaatcaaatgatggaaatggaagcaaccctgacattgaggaagtgccacaagacatgtaatcaccctgaaactttatactatacattactttgttatataaaaaaaatataaacacacaacataggaagctcataaaatttctcatacttactaatccattggtagcatgtctgagtcacgaagctgcttctggggacgatgcataatttgctgcttggggggatgcataatttggttatctgaattaccttgttgttcaaagatgctgtcgttttcagcaggcatcattgaaatgggtggtacacacacggggtgttttcgattgacaaacttgtaattgtcgaatatcaattctggtacattatgagatgatgtgcctgcttgtgagtcattagcatgttgggtggaagcattttgagaactactctgtgggctgtcaacattcaacacttgttctatgtcttctgggtagagtggcaagccagcacgtttccttttcttttgtcttgtgttccaaaagttctttatttcgttgtctgtgcgaccaggcatctaacacatacaaatgaaggcacaagtaaacacttatatgaagcacccatactttaatttgttccacgtattcaccgtcaattcaatttgctttaggtattcgatatcaatactagtcttggatacttcaggatatccaaactttttaaacatattatcaaaattcaatataattacatgaaacacatcaatatgtataatataaaacactatcgatcccttaatgaatcaaaaatgcaaattattctccttatacataactttaagaaaggaattagattaattataatgctatttctagtaaataatagagaataggttatgacgacaatggtctatgttacggatgtatctgtgacctgagtctacctagatgattaaccacatacaactgaataacacacatggccactgctggttcaactcgaaggactcaaataacttcacgtttagtccttgtttatgaaatttacttcttttatcatggatgagacaaaacatctataacaaaaaagaacaaacctcttgtgccattctggcccatttgtttcctagtaaagcatgaagttcaataactttacgttgttcttcttcagtaaatgctccttttttcaagtctggtcttagatgatttgtccaccttaatcggcagctttttccacaacgagctagtccagtattctttcgcactatattccaatttcccactccattgcttgtcacatatgccgccaatattgcatcctcttccgctgtccatggtcctttctttagaaaagaatcgtcttctgttaactgatcatcttgatcatcgtcaccattacttttctcgtgtgggaacgagttcatcatgactactacttattttaaataaaaataaaaattaatagaaattccaacgcatgctaaaaaaactattaacaaaagaacttatacattaacaaagaaagataaaaacaagagaaattctaatgcatgctaaatgaaaataaaaataatcaaattttatttatttttaagagcaaacactttgaggttttttatataaaagagaaaggagtattatgtgctaaaaaaacaccctacatttaagagttttgctgtgtggaactcttttttaagtcctctctcccccttatgctaaaactcgttcaactattatttagtgtcaaaactctcaaatctttaaaacattgattataccttacctctgagagacagaaaggtgatgctgacggcaatagctgaaaagatgtctatacatacgttgagttctgactcagattgtatagtgtggagaactgcacaaaaaattccctggctaattatgaagaatatatgaagtctttgactagaatcagtttctttttggtaaattgagttgattttataatggcaaaagagtttatcacatttaaattgataataccactgagtggaaagattagtaataagcaggtttgataatctttgttactagataagcgaatcggataatgaagttgattggatgtaaaagaaacaaaaaatttaaatttaaattttcaagttttctatttaattttaaagtaatattttttaatatcatataacaaattattcaccagcaaaatcttttcacatccactacagattctaattcataggatatggatttgttttttaaatcaacttttttgttgactggatcaaaaagtaaattcatttgtcaggggaacttcaaagttcaaactcagtttgaaataaaaacaatttgatatcttttttttttaaaatagtacgtttgatgttaaaatttaatttgaaaactcaattttagaaaaataacaattgaaatatttttgtaaattcagtttataaacttaaatttaagtttgcaaattacaatccaaatatacattttgttgaaggagtgtttgtttctaatttcatattattttcacataatcacatttcgaagaatattatgattcgaaatgttatttttggatatatttaaaaatatttgtgattatattttaatatttttagaaatatcttttaaaattcaaaaaataaataataaaggaagtttatgttatttttgaaaataacttctcttatcctcgtgaaatatcttattctcgtattgttcatgggaacaaagtgtaaaagaatatgttaaaaaatttatcatatttatgagaattaataatatccataaatatgttttcgaaactaataacaaatatgggtatataatactctcatgttataattttgggaataaaattttattctttgaatccattaaatatacatactctttaaattttataataagtagaatctaaattgattttaagtaagatcaaattaaatccattttaaaaaagtagttaattgaaaattttaaaagtaaaatatctaattgattttttaaaaaaaaaaaataccttaattgaacatacaataataagaatatcaaatttaactagcaaaataagttagaggaaaaaaaattaaatcattttattatagactatttccttaccccaactaagtaaaatttatgaatatgtcattgtgcatgacacaaaataaatgtttattttattcaactataatttataataaaaaatatttttaaatataaaaattatattataattaaaatttgtaataaatatttttaaacatataaatatattttaaatttatgataaataatttttattgtgatagattgttatttttaagataatttctttttaaaaaatttaaattcaagttaatattaaagatgttaaaatgatagattgaaagatattagaagttaagttaacctatttagataatattaaaaattataagatgatatatacatcttagcaacatatctgaattttgaaaataatatatatatatatatatatatatatatatatttgaaattattttttgatatttagttacgaattgttaaatcaaatcattaaatatggattccaaaaacagtgagtcgatcaaaacaggtggtgcagtgagtcgatcaaaacaggttgagttcatttagacatttacggaggatgaaaccccccataaacccttaacgcccgatgtaagaagtagtgagaagccgcaggtatggatacacacagagacataaacacaaacacttagaatgcaatggaaccctgtgaccgagagaacaaccacaagaagaagaacattcccattccaattcatttgatccatgatgctcccactcaaacatgtaaccaaacaccgtctcagatccaaatccttcatctcctccattctcgacctgtgctttgaccatgctgcatacacttctctagcatcatcatcaccctcccaatcaacatcatcctcagcctcaacttccttttttatctcccaaaacgacgtcgcgtcctccttcaacacgtggttcgcggcggcgcggcagcagcagctccccttcgatcccctcctgaaccgcatccaccagatcatctcctcccccgacgacgaggaattatccgccgcgctctccgccctccgcctccccttatcggagcgcctcgtcctccgcgtcctctgccacggcgccgctcgccgcgacatcctcccctgcctcaagttcttcgactgggccggccgccagccccacttcttccacacccgcgccaccttcgtcgccatcttcaaaatcctcgcccgcgccaacctcaagcccctcgtcctcgacttcctcgacgccttccgccgccgcatctttcaccaccgcgtccgcttccacgacatcctcgtcgtcggctacgccatcgccggaaaaccccaaaacgccctccacgcgttcggccgaatgcgcttccacggcctagaccttgattccttcgcctaccacgtcctgttggacgccctcgtcgagaaaaactatctcaacgcgtttgacatcatcgtgaggcaaattcgcgccaagggctacgagaatcacatgacaaatgtcattgttgttaagcatttgtgcaaggagagaaggttggaggaggctgagggttttctcaatgggttgatgtgtcgtggagaggagttaaaagggcctgaagtgagttttttaattgatgcattgtgtgagagttataggtttgagcgtgcggttgagttggttaagcaatttgggagctctgggttggttccattggatcatgcttacggggtttggataaagggtcttgttcggggtgggagggtggatgaggcattggagtttttctctcagaagaaggactctgaagggtattttcctgccactgttaggtataatgttttgatttgtaggcttttgcaggagaatcggcttcacgaggtgtatgatttgttggtggatatgaatgagagttgcattcctcctgatgtggttaccatgaatgctgtcttatgcttcttttgcaaagtggggatggcggatgtcgcgttggagttgtaccattcgaggtctgactttgggttgtctctcagtcacttggcttgcaagtatttgatacttactttgtgctgggatgggggcgctgaggaagcgttcaaggtgctcagaagctcggctgagcggagttattttcctgatgggcggacattttgcacgcttgcgagtgctttgtgcagggagcacaagattgatgagatgaaggagttgttgtatcttgccgtggggcataatattgtgcttcctacgtcaatgtatgacaagtacatattggctctgtgccgggctgggagagtggaagatggttatttggtacatggggaacttaagagtgttgctgccaggacatcgtatgttaagatgattaagggttttgttaagtctggtaggggagatattgctgctcggcttcttgttgaaatgaaagggaagggtcataagctgattcgtccgctctgtagagatgttatttgccgcttgcttgaaatggataattcaagagggcgctttttcaatctactggagatgctgactcgttgtcaacattcttgtcagacttacaactttttccttgacggagctggacatgctatgaagcctgagttggctagggaagtatttgagttgatgcaaaggaatggtattaagcccaatttgtcttctcttattcttatgttgcatggttatttattcaatgggagaatttctgatgctctgaatttttttaatggtgtacggcaccagggtttggcaactaagaagttatttgttgccttgattactggtctctgcaagttcaataagatagacatttcacgtgagtactttttcggcatgttaagagttggattgaatccaagccttgaatgctatgagctacttgtgcaaaagctttgctcattgcaaaagtatagtgaagcaatacatatcattaatgtatctcagaaaatgggacgtccactaagttcttttgttggcaatgtacttctttatcattctttgatttcaccgcaactctacgatacatgcatttatttaagaggtgtggaagagggggtattttctggtaattcaacactttgctggatgattggtgcattttctggtcgtctcagagtgagccattatattgcggacctggaaagattagtagagaagtgctttccacctaatattttcacatacaatttgttgctgaaacaagtggccaacagtgatatggacaaagctcgtttgttgtttgctcggatgtgtcaaaggggttatcaacctaattgttggacatatgatatcatggtacgtggtttctcatttcatgggaggaaacatgaggctaggcggtggcttgaagaaatgttccgaaaaggattttatgatgaaaatcaatagaatattcatttaaggagaattggacaaggtccaattaatgtgttaaagatgtagaatggtttatccaattttggtaaggataatatgatttctattcatttattggaaaaatgggctacattggatgcattggttttagtttatctgtttaattgttattctttagaaatccttgtatctctattcccctcccccttttcttcttttggtggaagcattgggaaatcaaatatgtttccaccttgtattattcatcacactagattgacataagctatgatatttggcatagcttttatacattattttattctccatactgaatcgttaatgttagaagctttgcttcttatcctctttttgtgctattgtcatcacacaatgaaaaataatatcagattattcatgaatcagtactcaattttgattgattttgagtcttgaaaaagtagttgttagtgtcactaattactgaatcattgattttggtttatctacgtgattttctattcaaagggatttgaatatgattgcagaataagagctgatatgagatcgttgctctcagttatatgtttcatgtggcactttcttactttcttgtcatctgccatgatctaatatcatatgttttatgcacttgttgctgtattctctcatcaagttgagaatgtgctcaaattcattgagaaatggactgcttacttcatgatggcttgggggtttaatgccagtaccatattggccatggacagtagtcattgcaacaaacatattgtagttatcagagttaaaagggatttgcttcatacatctacctagtaattttccctatgagcttccttacatcctttcttgtaagcttaatctgttgtggtttattatctttttggcaagatttttatttatttatttatttattattattgtggcatgcaaaattacaattggtgccttttgctttgatttctttgatgggcagtgtttggaacttgacattatcagttttgtgtctcttctgtcatttttagtgtcaggttatatgatttatgttaaattcctcaaaatctgataccaaatttgtttagccctgccttttttttttttatcattatttacatactttctactttctagtttcaaccgattaataattaggatcgctcaggtttttgaggcatgatatacatacaatggtattcttttccctcgaatcagatgttttctggccctagtaatccctccattcataactttatttgaaaaattgtatgcaacatttgaggtattggttggattttgcatggcagtagtacttcgtggccaggtgcattctcttgtcactgctggctgaatctaattgaaagttgaaatggagaactggtcttgtagaaagaaacagagaagagaggaaaaagttatgaaagaagtaaagaagggaggaagaagacaaataaagaactgatgcagctaagagagccattagtccgttaccttagaggtcctaagaactcaagctgtaattaagtaaaagagtactcctgtgtctctaattataaaactattttcaaaaaattgtttttttttttataagattcttttttaatttttaaatatattaattattttttcttacacgttcttttttaattattttctattcaaatattaaaaaaaacaattaagtagatagagagataagaaaatgataattttggaatgataatacaaataattgataagtataatatgattaattaaattaattgtttttttaagggttgcaaattaattgaaagaagtgttgaagtagagagaatgaaactcacaatggagcatgggcagtgcaacaaatttaagtttgaacttttccgttagggtttaaagagttgcatcttatctaacattacatggcaacaattccttatttggaatatccgtgcatcatatatttgagatattaattaagtcaattgaaatgtttggatgtgatatgaatatgaagaagctgataggcaactaagcatctcattacagaaaatgggaataacctcacacaggaatcagaatcacaggttcattactctcaaactctagaaaacataaaatagaatactaatctatgcaacaaattttttagaatactccgaatagattgatttaaagtttagctggatagttgcatgagattaatagagaatcacggaaatgtaatatatataccctatgcaacctttattttttgttgcatctgacagtaatttattctagttctttaacagaagatggtaacataaataaatgatggttaggaggctttttagatgtgagtaaaactcatattggagaagaatatggttcggggattacttttattaaaactttgtttctaattgatccgggactcctttaccttgaaaaatcatacaattacctcatgaaaaagcatttatctttaagaaagtttgatgaagacaatagaacactcggtgcatgatcaagaagagagaaaatcgttcgcttgttgatgcctattgttagcaccatcccagtcattgatttgctactacaagaattcatcgtactatggtagccagagttcataaagtctttccattgtttcgattaagccacaaagcaagttggtagtagctagtaggaaatgttagattgcaacttcaattttcttgtgatagtgggatactaggggcggattctagcatgcatgctatacatgaatgatgaaccattaattacttctaacaaagaactgaactagatggtttgattgtgaaaaccagtttcaaatggatgatgaagaaccaacatagattgccttaatttttttgtattattttaaagaaatttattcaacctttttttcactcgaataaaagtttaatattaagttataaagtttcatttatatataatagtatgaaatatttaaagataaaattttctcattcataataattctaaaagtactaaatttgaacaagatttgagagtatatatctatggtaaaacaatgtgttacgtgcaaatgaatcgtgtattactgaaaattagtgttgcagacgctgtccacgtatgcagggtgtttagttattatttaccataatgtattcttttgtgctttgacagaactattcattttctctagtttttcagtcattcaaacttgtaattatatgtatcccacgtagtacagaaatagggtttgaaacaatataacaaaaataaagacctcaacgcattctataaatgttggtttactaatgtcaattgtcaatcaacggaatagataataccaaattaaaccaaggaaaattcagaacccaattattacggataacagtaattgtacaggtaacagttattaccacctgtgctcatgactgagcacatcaataatttcatttttgcatttaaatttatatttatttctcacaattgctaggttgatgaatgaaggaatgaaatacaaaacaaggaaaacataatttctatatctttccatcaattccgaagtaatcaatctttaattataaaattcttttagaaatttatttatctctttttatataaaaaatttgtaatttttagatgcattgattttttttcttcaacatatatttacttaattattttcttcaaacattaataataaacaaattaaattaatagaaagataagaaaatgataattttagaatgatagtataattaattaatagatttaatatgattaataaaattaattattgttcttaaaaagcataaattaattaaaaaaatcttataattaatcacgaatgaagtacatagtataacgtgagataaaggaagtgcaagtggctaactagattcacattatttttaatttgtctaaaagtggaaggaaaagtaaagaaatgagtgttatttttttacaaaaagattaaattgtcttcttttttatatatttcttttcatttatagatagcatttatatttattctattttctttttacataattaaagaagagaaagaattaactatccttttctcattttaaataatttaaaaaatcatctcattaatcttctattttttctttcttttttcactttctttcctttcatgtttttctttaaaataaacacaccctcaaggagaaggcatattatattaggagtgtaaaacgtttttaaaaccattaaggtagtgaaaataaaagtagtttattatctaaatttttttaacattatgttttgtttttattttcattgatcacataactaattttgactattttcataaatatttttttatttttccataatcttttctaataaattaaaactgccacaacttttctttttcaccttaaaaagtaaaaaaaaatgttttttttgtctcaaattttttatattaaaaactaccttaaatatttatgtgaatttataaaatcgttaactgtttttagtgacttaaaatcataaaatgatttataattgatcaatattattaaaaaagactactacaacatagataaatcattgaataaatagtcatttttatcccttaatgtgtaaaacacagataaattgatcctcagaatatgaaaatctaaattttagtcctaatgagaaaagtgacaaaattatatttttaataagcataatgttgattaataaacacaatttgtctattgtaaaatttctatttgtgacaatattagatagtgacaaaattaagtttgggtcttttttttaagaattaacttaataactatgcatttttgtttgagtctcatatttggataaaatatgtctcatatttgtttttctattttttttaagtgtttattataatattatgtttgcaacgattaaaaaagggatgaaaataaaaattaaattatattttggataaataatcattttcgtcattaaatgtatagagcgtcgacaaattaattcctgaatgtatcacatagactctttcattaatggtaatggacgaaaattaatggattgatttgtcgtactttttttacttttagggactaaaatttaaatttttatctttcataaacgaatttatcaaactctacacatttaagcataaaaatgactatttattttaaataattttaaaatgtactttggtgtgaaattcagattaagacaaaatattacaaagataaaaggcataataattgactattttttcattgtttcccacttaatattgacaaacaaattaccaatcatattattcgtttctttctttattgcctccttttatcttcctttttctccgatcccccattattgctgaaacaattagcaactattgatgggaaatataagtggccaaaattatcgtgggtaatagttctttttcttttcattagccaattaatattagataactgataaaacagaccacatggacaaattttaatttgaataacttatcgatgtaaagggtaagaccacataaccaagtccagcaaagcttctactattaatggtgaatatgtaaaatcaaaagacgtctttcatcagttcatagtagtcatcactactcattaagaaaatggagatcaataatatgcctatatatatatataatatagatatgtatgtctacaaatgatggtgcttttgataataactgttgaaaaacgtgggaaacctttgcaaatgtggcttggctagcattagaaatttagaataatcttatataataataacaactatttgtagtttaatgaaaaatttgtacttaaaatcaatcccttaatgcttagagttgtgttttctatgatatttcaattaacttttaatttttttattaactgaaaaaattgttttactttttttaataacttcttaataatttttagtgattttttaaacattgctttaaaagtaacgttttttaaaactttagtttgtagtttttttttatatttttttatttttattctcaatatattttttaattttctagttattatttttaaataaattataatttaattattttctattattttatatttttcgactactttaacatctagttttattgaacatttataatttaataaattagctaattttttagcttctaaatatcaacttgcaactaattttccaactttcaagctaattttttaggtaatcttgttaaacataacctgggttaacaaaatgaattccttagtagtatatattgggttacttaatccttaaaatacttattttgtaaaatataaatagatttcaatgataatgataagaatatacttctcaaaatattttctttcataagcaaacaaaattcaaaattgaacctaaaattacatggttaagaaacttgaatcctagccacctaaccaaaccaataatttttttttttttgtaattgttgatcaatacatattgattccattgtcttgcatgaattagtgacttgcatgtggacaattgtagcaaatacattgttcactacgaattattttttattgaaaattcagtaaaaagtgcaaccttagcaccatcgaaaataaagctgcgcatagagagttagagcttaggtagttgcaatagtggagaaatgagtaggtcacgagtttttgtaatgataatgcctctcacataccaaaatgccgcacatatataacacatgaagagaaagacgataggacatgaagaatttagttttgatcgtataattaaaatcggtgataaaaattagattcaataaagtaatattcaatatttgtgtatagttattgctgtaaaaaaaattatttgtgtatagttatataattaagattaatttctttcacttagcaagccttaagatcaaagttcccttagagtgacgacttttgaagaattgaagtgtaatcaataagctgtatcgaaaatcttttgaaaagaatgggaaattaagagaaactaaatcaagaagtaatatccaaaaatctaagctgatagtgaaagctatatgtatatttatatattcccttaataattttcacgtgttatacagttgaatcctttctttaatttattcatgaacagcaaatgacgtccaaaatcacttttacattcgcatcaataatttcaattttttgaatatggcattctgtgggtacccttatattaaatgaatttcaactattagggttctcatgatggatcaccaattgctttccaagaattatattctatatatgttggtgccctcctgcgcagccctgattaggaccaccttaagcaaaacgataaattttatgtattttattttattactgcaattatatttatattttctcccctaaatgaattattactccgatcttagcattttttattattatcttgatctgtttgatcatgaactcacaagattaggatgcatttagtaatccaagcattactattcctcaaatgctgtgtgaaatcacctgattagatgattctttctggttttggagtggaaggagaaattatttgatagttttaaactatttggttcttaattaatcatcacataacttatgaataatcaaatgttactatttctttgtaaattaaaaaaaatctaaatgcatgttatataaaaattgattaaaactctaaatatttgatatttcaggattatcaaataattttttcgagatagtggttaaaatcaaagaaagaaaaaggccagctggcatcatgcactctaacacattctttattgttagtttaattttgttagaaatcacaatattgtatgagactcatttcttatttaatgaatctcactcataattttatacttctaaaataaattttagctaaatatagagaatacataaaaaaaagtgctaaagagtgtcactaatactcataaaaaaaaattgcaggtaaaattgcgcagactcttttaattagggaaaatacgtttggaacaatagacgatgccataaccaattagagtcagattaaagctataaatcctaaatgacagagaggatattttacctatacttattcgtaattaacatagtgagtctacttaatctcacccaaaaaaaaaaaaaaaatagtactgacactacgtacttaattaaagtgaaaacaagagtaatttttatattcttttcctcctagtcatcccatgataattcataattctccctaacctgacatcattataaaagacaacacatataatcccacttttcataattatatatcttcatggtatacaaaccttataatacgaacgtgtagtagtatactgcaagttagatcttagaagctttgctttaacaacaaagaactgtgaccaaattaactatatatgtgagtaaaattttctcaaaaaaaaaaaaaagaactatgagtaaaacagaaatcagccatcgcaatacaaagtggcttgtgtgctttttatatcaacatttatttatgaccaaaagtaaaaaaggcatcaactgcttcaagccaaactcattcaaatattttctctttctttgtaggacatgaacctagtcatatgttttatgctgacaaaatgattttcttgttcttattttaagcatatgtgtatttaaattagagagtgataaatataaatggagaaaggggagggggggttcatcaattttttatatgaaattatgaacccgttcacatccttgttaacggaaattctcactttccaatgcacacaaaaataagaagtaacaattgttgaacggacgtttgaggcttgccaactacaaatcaaacacactctatatctcaattccatacatatatacacctgtttgtttattaacaatggaaaaatggggggaaaaataaatacacaccaaaaagtaggtcataactttggctgatctattcaatcacctagtgtaatacatatatatgatccaaactgtaaacagagaagagaaaagaaaaatgagaacaagagagagagttatgtggtggtgttgtctttagaagttagaaaccaagagcaacaatattcacaatatttcctacatcaaaattgcatatctcatgctatcacttaccatgagatggttcatttcagacacttctgagaattccccagttacccaaaccccatcagagccattatttacctgaggctgagaaacacatgagagtattgatatgggggcttgaagaatgctacacacaagcccccaaccatattgtcttctgcccctctcatgtccaaatagctctacaccgtttcctgcttcaaacatgctctcatctgccaccttggaactctttcttgtgttctgaaggtttcttgccactgcagctagaagacgccacatcttcaactatctttggtttacttttgctacctagaacttagattaattattatatatatatggttctcagctagttggagtaagtaaagaatattggagactctgaactctgcagagaaaaacaaagggttgttggaagggccaacaatttctacaaagccttttaataatggtattttggtggtggtattacctagtgcttgtgtttttcacaaaagatataatcatctagtatgatatgatatgattgacagataattttgtttcttcaatatgtgacgagagatttaatttccaaatttgtatatgaaaaaatatttattaagagatgttaattccttaaataaatattaattatcgaaaaattagtctttgactctaagtgagatatcattcacccaaaaatttaccacaaaaggtttgttggtgcattgtagttttaaagagggcaactatatatgaagcagcatttctcttcccattaatcaaaggtggggtctagtatgcccaacttgccgacaaagctgcctaattgtacaaaaagtcttttgaggagtctttttactatcaaacttcgggtttacttttgctgagttttaatggtgcatcagttacacaactgtttttaccttaacacaagaaggaattttaaggtatggcttttacactttacagttcatttggctacaattagaagggtccctaacactacacacatgaagctttggacaaaaggtttagctgcagatcttatcaaaattatgtagggtggtatcaatcataggattagaaacttcagcagagaattttaaccgttcatgattgatctttgtagacatggcttgtttactagaagagcaattcatcagaataatgcaaattttttgggttcccaacacatcaagagtcaatataccggtgccaaaatgtgatgcagacccatgtggaagtttgtcaatgagtactattcctccactaaagaagccttatcaacttgtggaaaaaccaatgcctagataaaaatgcacacctgattaaacttgatcatgaagcaattagggagaaaaatatgcaactggattatcattaagcaaaacaatcaagtatataatgacttcttagttatctagtattaataaataaatgttgtgtgagtgatataacttttttttggtgaatcaggatattctttggctgaaagtgaaagactatttcctcaagatactaagatttatttaaggggttgacctcttccataaatcatgtgactaaggactacaaaaattatttatttcaagatacaagataaatatattgtgctaaaactaaataatgattacttgcacgcaggacatctaatcaagctattcttatttcttaataattattttttcccaaccaaatgtgaatttgcatgatccacgatcaatatacaacaagtcaactcatcacaaccataaggataaatacatgattatactcaagacgtagtccagctaaaattgacaccaccaccaaccaaccttccatttgtttgtagtaatatcaatccatcactcttccctctctgtctcacaccctcactttcattccttatctagcttattccattgacttaatttggcattagagtgttcgtgaaccgaagaccttcaattccttcatcatagattgaccctcatttgcctagcaggaccactgtacactaccaactaaacattcctcaactattgcatttgaagtatctaattcttttggaaataaaataattaaaaattaaggctcttttgggtatataaactcctccgtaactaattaaaggaaaggaaaataaaaaataaaataaattgagtttttttttttcataagttaaaatcaatttacatatttaacttttatagaaatgccctcatttaagttttctaaaagttgaagtggatacgtcgattttaacatatcggagaaattcaattcagtttatctaaccaccagaatctaattgcattttagttaatatatagtatagttcttggcttgccaaagtgtgttgaactgaaattgaaaatgtcagggttagaccatgatcaaagtggtagtacctagaaaacgtactcagaaacataagttgttatctattttgaactacaaacttacaactgacataaagagaatcagatgcatgcatgcatcccttttctactttagaaaaactccaataaaagcaaatatccaacgagttgataaaaatcattttatatattttttccatactttcttttaagcttatatagttttcatacttgcttataatgccacgtcatttttactgctttaagaacaagtttaacataaattgctcacggaaaacaacttaataagtgcttttagtagcaagtttatcacattggggaggcaattaaggattgctgtgacgtcataacaccggttgctcggataagcaccagtttctatttaattttgtgcgtctctttcgacttttatgccaccatcaatctttgttggatacaactttgggatagcaccttttgtatttttttttgtgttatttttaactaaaattcgaattttaactcaaataactaatgtatttttttaagaactagtaatgtcgattattaatgtgacaatttttgtgtgatttaccatttcagtggaaaaaaaaaacgaagtgagttaccgaaataaaagcacataataaattatacgtaaatttatcctattttgtttctataatatactgtatggtaagaaatagaaaaaatgtataggaaatagaatacaaaaataataggaaatacttataaaaataacagtaaaaaatgtaaacagtaggaaaagggtccggaaataccaggagatgcaaattgcaaacggtcaaattagcacctgtaaaaataaagaaaaagtttttgcatccgatcaattatttcgaataaaaaattgacatgcatgtattttaatgaattttacaataatactttaaaagttatcctttaaaaaaaattattaattaataatgtaaaagtcaataaaattattataaggataactttaatgtattattgtaaaagaaaataaaataccatacatgtcaatttcttattagaaaaaaaaattgattggatgtatgaaaattaaactcatttttaaataccttaattcataacattttatatacaattttacgtcatacatttttcatcttcttgtatctatttattttctcaaattctcaactttatatttcctttattttcctaaggattgcatctcaatcaatataatctttttttttaaattagatgcaaaattctaaaccttcaatttataaaaaatcttccaatttcttcaaattcttttaactcggccataggaattttcctatgtttccattccataattcttttcacccagatatttgccaaataggaaatccatttggaatgtcaaaccaatgtggattgaatttttaatcacaacaactacccataacatctttggtggggtttcattgagtattagtggtgggaattgattcaatctacaatctcaaatactaattgatttcataaagaagtatgaagttccacctttaaagggtgatcatacaaattttaaaacaaaatttagaatgaatgaatttatttcttagtcaaacatgattgaatattataatatatattgatgaaaaacaaagggtgatcatacaaattctaaaacaagatatataatggatgaatatatttcttagtcaatagataattataaaagtaaacaaaaaaagttgttattggataagaatcaaaccagctaatgaacattgtaataatttagagagaaaggagtgattgcactaaaaaattatagacaacattacaaattcaaaaatttaagagtacaaataataagaagtcacaacaaagaaaaattacaattcgaaaatgatgtcataaataatacttgttttcttttatccacatgaatgaaagttattcaaatttgaatccacaaacggatctgaatttaaaaaaaaaaatctatttcgggatatttttaaaattctatttcatgatatgcacacatcatcctaaatttgctaaaaaaatatatgcgtttaaaatcctaagagaaacttagatattcatgataagttgttctcttattatctctaattagtaattactatttgagttactttttccattacttatgcaagagtaaccaccaatagactcacccttagagctcttactctcaataaagggttttagtgttaaattttcagccttccgtttaattacagagtaattaacagtacatcatgtagacaaaaaaaaaaatggaggtgtcgtttataaattttgataatgcatgagtcataattgtgaggataggaatttatgttcttagtatcatagcttaaacagggggttaaatttgattcttctacacaaaagatttaatgataaaataacaagttataattattaattacaaaattgacaataaagactataaataaatatatgcaaacatataaaaattattgtgattaaattacataattgtaagaagcttcgcctatattttaaactactcatttattaatcctgtatgggcaagttaggctaacctaggactgggaactatgctggttctgatccaaaaccaagcacacaaattaagcactttctgtcaactattcttttcgtggcaacagaaattactaacagtatgaaatgaaccttcgtgaatatgttatcatcaatcaatttttaattagtttgattgcaatctcccaagttttatacttgtacaattaatctgaagttatcatagtgggctttacttttgtcctttttgtaccttctttgcgcgtgtaaattttcacttatataatatgtttaacggacaactcgagattaagtgggcgactaaaaattaagtggacgaaaataaatttgttaaaaaattaaggagtttttggtgcagaaaattttaggggaaagaatatgttaggttcaagataaagaaaggtttctaggttaaaaaaacatttataaaaaattatatttagcacagtcaaaaagataagagaggattcaaacttataattacctaacaaatataaaattttatattaataagttgttggtataagatgattgaaaaaaaaatcataaaaaattataaatcagatttttaaataaaaattagtcatacacaaaggttgatgattactctatattagtaatataataacaaaaaaaaaatattaaaaaaaaattgttttgttttagtcgataaacttcttatgattaacatatatacatatatatatatatatataacaaacccatgtattaatttggtttactataaaactataattttatgaggaattgagggggagaaaagtagttgaccagaaagtgatggatggattacacattattagttattaaattggaatgtttgcacattttgcataaatttatgtcctcttgacctgccgactattagactatatcaccacagctcagggaagcaccttaattggttctgtagccaagaaagcgaaatgactttagcatggctatgaaataaaaatattcaacatttatctacattatctttatccttgcattggaccatgacaccatgtgactttatagaattgcactggattcatagagcctcaactaaatgcatcacttattattttagtgtgctaactttttctaatgaagtttcactttaaactaaagaataaagagaacaatgatggtattcctcccatgatccttatatgaaaattagattagtggtatcatcgccttaaaacaaatgggaattgtgtttcaaagtcaaagtcaactatctttaccaaacattatagtattgaccatcaaggattgtattggtgtttcttttttattatcaaatttttttatcaatatattggtggggtttaaactttaaaaacaaataatcgtatagaaacaggaggctaaattttttcataattttatttttctaaaagaaaaatcttgaagaggccttctctctaacataagtgtgtgtgttgaaaaaagatttcaaagtattatttaatcaattatataattaaaatattcgttacggtagaggcaattttatattatgtgatagtaatttttatattgtcaataatatattaattttatgaggcatttttgctgcaattttttttttttagtatttttcttttagagaaatattagtttcacacatttaattctattgacacatatcatcatcatattctttaaattggtcactatgtaattttttattattattattaagaaccaaaacgatggactcaaaaaggtccaaagtttcttttttttcaaaaatgtatccctgaaattaaagatagtaatagcatatgtcttgccaaagcatgaaactttcctcgttccccaaaacgtgaatccctatcaactatgtcctttatggtccattttgaaaagttagaagtaccaaagatgacagtggcaaaaacaaagtggaggcagagcattggttgcagcgatggagaagttgttgagtgtgttcgttcacgatctacgcttacgagttgaacctctttatggtgatcgacacactcctgtcaaacacaaaacactgcccaagggaagaggttgcactgagggtttaagggttaccatgaaagctgaggctgcagtattgggtagacaatgttttggttcttaataatgataaaacaaaatcaagaaaatataaagtcacaaaacttaaacaattggtgaacaggagattaattttcaaaatatgatgatttggtccaattaaaagaagtgtgcttcaaagagtgaatgagaatgtgacctaagatcgatccaagctaaaaatatgatgatttaggtccatcaaaaaaaatatttttattaatttttataaagcaaaaaatacctcatatttggacaaaatatatcataatattgacaaaaagaactaatatattatactattatttaaagtaaaaaaaaaaaaaaaactctttaaaattactttaaacatcattcattagatcaatcctaatcttagcatttctcactaataatagtctttggcacttgcttggtgcatcatccaaacattttagtgaatgtttaagaagtacttgatttcaataatagaaaagtcaatgtctttcattgatttgtaatgtatacattaaaaaaaatatagaaatagttgtacaataaaattggataacaactaaaagataaattcaattaatacggttaaaaagcaaagcctgtgacccaatgtacataaacagatttaaacaaattggattgggttcggcccaaataaaaaagtctaatcgggtgaaatcgaatttatgagcgaatcgtacggtgaacatcatattcttgatattctttttcaatgatcacacatttttatttttctctaaactagaattttcagtttaaagcaatcaaatatcagcttatctattttgtgagagattttctggattaatttcgcgcgccagaaaccctagaggaaccctgattcattcgattcgctgttgccttcgaatttcgttccttggaagattagggagcaatggcaattgcagccccagggcatctgaacgtgaatgaatcacccatttggggatccagaagtgttgattgcttcgagaaattggagcaaattggcgagggcacatatgggtttgtttcaatttctctactgcttaagctttacgttatcaaaaacaagtttttattttgggttgtctttgtgaaaaatgtagatgaaaatttatgaagtcaatggtaactattatacgtgtttactatgcaacactctattgggattattggagagattctgttgggctaggttgaacctgaaaacaacttaaacgtgaggtttttagaactcttgattctttatcatgtagctattatcaatcagaaaattttatcggtggagaaatcatcatagttatctattgttcgatgcattgaggtttaattgttttgtatatcttttttttaaaaaaaaaattattatttattggttccaaggttttaaattgcattcatgtttaatggcgatcattgatattgtgggaaattatagacatatgtggctaatgcagctgcaattgtggttgtgaacttgtgatgtggttgcagagacccctaaaacctcggtgttgtggctgcaattgcagttacgagctgtttttaaaaaccttgattggttctttatggtttatttgactgtttgtgcaattttttttttattgtcttatgttagttgttagtttcctcaattaacttgggttaaagatgctattgatatcgatcttgatgttagttgttagtttgttagtttttgttagcaggagattcgaacccacgacctctccccctcccttctcccttccccaccaaaccaaccttatatcttcatcttgtgcaatttggtgtcttgtgttcccttgtctcttgtctgtttttgaagtagtactttttgccacattgctttcttctttggacatagttcccaactccatcacacctttaaaatgtcatctagttttagctttgttcatagcaatgcaattttcccccctttatgttccttaagctcttgttttgactttacagtcagagaaaaaaaaaaacttgttcccacttcattgctgatactttctcaagtgaactgatgtataccttaatatatttatgcttgcagtcaggtttacatggctaaagagatcaaaactggtgaaattgttgctctgaagaaaatacgaatggacaatgagagagagggggtatatctttgatttgaatatttcattatttattacattatgggtgcataatgtattttatttgtgttttcctccaattgtacgctttcctaattagtctcctctgcttttacaaccttttttcattgtacatgctattcagtgaacctaaatcggaagttacagttaaaatctgttgctacagttgctcctctgaactgtattgtaaattttgccattgcagtttcctataactgctatacgagaaatcaaaattctaaagaaactacaccatgaaaatgtgatcaagctgaaggaaattgtgactgatacaggtaccctttttcaagatttaggatttaaaaatttgttttatatataaaattgggttatttctttcaggtcctgagaaagatgaacaggggaagccaggcaagtaattccttctcgtttaattagccaatttctagacagtaacacataatatgctttatagttctagtggtgagaatatttccatgattccatcaatttcttttgggctttgcatactaaacttagttcatctgcttttcattctttttttggggattgcagatggtaacaaatataaaggtggcatctatatggtctttgaatacatggaccatgatttaacaggtcttgctgaccggcctgggatgagatttacagttccccaaattaaggtattactgttaataccaagtgttatttcatatattaatagttgttcgttttattgttgtctgagttgtgtttcccttcttaagtgttacatgagacagcttttgacggggcttcactattgtcatgtaaatcaagtacttcatcgggatatcaaaggtctgtgtgttaaaagattatgtttttacattagaatgttaaatctattattattcctatttgatgtattttattctggtgcaggctcaaatcttctaatagacaatgaaggaaatcttaagcttgcagattttggactggcacgatcattttctaatgaccaaaatgcaaatcttactaatcgtgtcattacgttatggtacaggtaattggtgtcatttttttatcatgagttatcaaattggccaatgcatatattgatttttggctatatttagaccacctgagttgctgctaggaacaacaaagtatgggccagctgtggatatgtggtctgttgggtgcatttttgctgagcttcttcaagggaagcctatctttcctggaaaagatgaggtaagtgatgttttatgtatgatagttcagagaaattagagctagattgatgaatgattggtgtgatattgattatgggctatatatggttttaacttttatcttgtaaatggctgcaagaagatattctctacattctgactcttcatattcgatctcttgacacttgctgccatatttattttactgcatattgtaaacatatctgagcctagttgccacgacccacgagcataaaataatctttctgttttcatttaaatggctttacattgattgctttcttcgggtgccaagctaattaattgtttaacttggaaaatgtcatttcattcaggaggtcaatgatgtttatgtattttgattttgaatatatgcattttgcttaattaatttttggttaaattaaaattttagtcctcatgagtgacactgtttttcattgtagtccctgtaagaattctatgttttggtccataatctctaatattttcaaattggtttctgtcgtttgctaaagttaatacagtgttagagattttttatgtagggagtagggaccaaaacgaaaaatggtgtgtcaggtgtagagatcaaaatgtagtttttttttttttcatataggaaccaagacaaagtgtaatttatttatttttggtataagaacaaacaaaaaacagtgtctagtataggttccaaatttaatacttgattaaatagcagggtttcatttgtaaacatttttcatgtaggaaccaaaatgtagagtttttccatgcagaaactaaaatgaaaaacagtgttaggtgtggggacaatttttatatttaattgtcaagaaaagatggaatgttaatgtttgggtacattgctggatcaaacctgctgtatagttttcagttatttagtcattacattcactctagatctttctgttaatatacatggcattactgtatatattcacgataatttttcgtacagcttaagtgtaatacaggttttgtttgtaactattgtagccagaacaattaaataaaatatatgagctgtgtggagcaccaaatgaagtcaattggcctggggtttccaagataccttattataataaatttatgccaacaaggccgatgaaaagacgtttgagggaagttttcaggcagtaagtatcaaaacaagagtatcagaaagtatataggcttttttatccaccaaagaagttagcgtgtaattcattttctagaaaaaaaattatatctaatagcttcttccccatgacttatagttttgatcatcatgctctggaattgttggagaagatgttgacacttgatccagctcaggtatcacttcttcacttataagtctgatttattaattgttaaatgatattgaatttctattttaagtgcttcaaatacctgtttttccagttttatcttttatcattcaatctgttttaacttggttaactgtatccacaattgttttgttattaattatatcatatatgttgacaaaaatctcagtaagcttaagagaaaaatattgtacatctgttttcctttgtgagaaatttatgtaaggtgaacattgatggcatagtgctagttgagacgaattttgttaagtaattatctttgtgctgtcatttataaatttgtgttgttcttggtgtaatctgaaaatttattgtaacaaaaataattattaaatttataaatgtaaccaagaaaattattatttgtcacttggctgcatggttttatgatgattaattttgttttatgatctgcatcataatatttgtttgtccattttatttctacagagaattactgcaaaagatgcacttgatgctgagtatttctggacagatccattaccgtgcgatccgaagaggttagaccttccatgtacattagttatttattttgagaatgttactttgaaattatgtgatcttaaaaggattaaatgtctgtctcattgattcctttcctttttacattattgtttctactcaactaatccttttctggtcaatacttttcaacttcgttctcttctgtatggcttagtttacccaagtacgaatcatcacatgagtttcagacaaagaaaaagcgacaacaacaacggcaaaatgaagaaatggctaagcgtcagaaaatgccgcacccacagcctcacactcgtcttccccccattcagcagcctgggcaacatgcccaaatgcgatcaggaccaaaccaaccagttcatggttctcaaccccaagttgctgcaggacctacgcatcattatgggaagccccggggtccatctggtgggcctggaagatatcctcccaatgggaacccaggtggaggattcaatcacccaaatcgaggaggtcaaggtggtggtggttatggcagtggatcttatcctcctcaagggcggggggcgccttatgggtccaatagtatgcctggtggtggtcctcgtggcggtggtgccagcggctatgttggagctccaaattatccccaacaaggtggtccatatgggggctcagcggctggtcgtggctcgaacatgatgggtggaaaccgcaatcaacaacagtatggttggcagcagtaaatatacttatgatgatcagtattagtactacaatttggcaataccctgctaaatttgagaaggaccagactatttatggatcaaggtactgagaagatatgagatatgacctctatggtttgtatactactgagatattcgttctcattacttgaagtgcttggaaacttttgtgatgcatgcatgcaccttaggtaatgtttggggctccttattacaagggcactacaagagaagagtgaacctccgattttgtagtttttttctttttcttgactatatacattgattcctgtgcagtatgtatgaatgttagcagcatacttcaaaatgtgtaacaagctgctgcttactgatattcttattgggatactgccttgcacaatattttgttttatgtagttttacactatagtatgatatgcactgtatatatggttatggtagtggtagggaagtgaaattaatgaatatgggtacgagagattatggaagacaaaacaaacaaattgcacacaggcagaagtggggaggagtgtaacatgtggatgtggttcaaggagagaaaataacaggtggcaaggagagagagggagaggagagagggggttatatgatgggtgtgataaccgaataggaggtatgaggaaattgtaagaatgagtgaagaagctagttctctaatttgttatttatttttctatttgtaaggagctagtctccaaccgctaccctagttttatttctttaaattttcttaaattgcagcattgtaagttgtaacagactaaaccgaggtttatatttgtagagttacctttaccatttatattctggttcccaacacagtaaaacaaaacattctgctttgtaacttattgttccctttatgatatggtgaccgaaaatattcaacgattaagcctagagcaaattttgcttcctatatatattgagacttttctgcaagcttctaaacgttcttatctccatagcgatgtattgtgatcatcagtggtttttattaacttttttcttttggttgctatgcaagtgatgatagaaggaatataagagggatcattgccataggaaaatgtaatggatccaacagaaattactaaacattttattatacttgtttttgtctttcttcataaacattaacggaaacataggaagattcattcataaagattaagaaaaaaggaggataaaaaaaatccaaaggaactaacaatggttttgttttagagaaaactaataatgtttgaactaatgtcttcgtctaaaatagagatatcataagtaaagtttgtctaaacctcttaaggttacttttacgtcaaccaagcattgtttaatgagatgtctgagtaaattttaaacattttagagaaacttacaactcattttggagagatgatgattaatatgaaggaaaaattatgtgattttacatggatatgaatacaacggtgcaaaagttacaagttttggtttttctaactatatacccttttggactcctaacaaaacattaccgtttcacatttgaaacaattcatatgatatcacatgaataatgccccgttgtttaagcatggtaatgctttccgacaatgacccgaaaataaaataatgctttgccctagatgaaaattattcacttagtcgcaaaactgaaagaacaaagcacttgttgtgatgcaaaagcattagtccacatagagaaagaacagctcatagtttgttactactacttgtagctgacgtctgggaatgactagaatgctttgttgtatgattctcagttccagattttggggtccttgggaatgaatttgtggaatgtagtgcttccaattctgctagaacagttaccatagttggtctatatttgggatcagaatttagacattgtagtacaagtgctcctgcagcccgtgctcctttcttggagtattgaccacccaaccttgaatccatgattctcaaaattcttttgctatcactcaagaatggccttgcccaatccaccagtgtttcttctgaaaatccaggtctatcatcttcaactacacgctgtcctgttagtaattctaacaacacaactccaaagctgtatacatcacttcttggggtcaaatgacctgtttgtttattcaaaaagcaacttattataaatgggaaaaatatatgctcatcaactttacaaaccatgtcaactttacaaatcatgtacataacatcacagcaaatgtaacattatttagtttttgtctcttatgtgtagagtactctagagttttgaagaaataaaccgatttgctttgtgttttctttttatatatataataacatatatagctatgtctggatcaccgttcaccccttttaaaagtacgttcaaataaagagcatcattctccaaaagtatgttcaacacccaaaagtaggtccgaaatggttatccaaacattcaaaatgttggccaatttgataacttcattttgagctgtgacctctaagaagaagttacagacaagttacctagggttgtgtttggattagcgttgaaaccacgtcaaatggagaaattgcacattccaatgcaaaaacttcaaagcaacaaagttgtactagctttcatgtgaaagtctgttggcgttgaattcaagtattcaactgattcccaatcacacactaggtctcttataccaaggactaagaaattagtgtagtgaactaggatgcattcaaattggtgtccaaatgaatttttagaattaaaaaaagtcacaagtgtccattattagtataacacagcatcattgcatcttcctttgtctcaattgctccttgcttttattttgcttctaccttaacatccaaaagctaagaaactaacactttgataaagataaagaaaaatggaaaggcaaatctacctgtagctacatactcaggtgcagcataaccatgagtaccaataactcttgttgaaacatgagtgttatctccagtaggaccatctcttgctaagccaaaatccgaaagctttgcattgaaatcctgcataaataataatgctactctttcagaatggagatttacatgcaaaacagcacgtgtggttttcttcacaaatccacaagccaaactttcagtgtgacataccgaatcaagtaggatgttcgcagcctttaaatcacgatatataacatttgcatcaagggtatgtaaaaatgttaatcctcttgcgacagcaactgcaatgttgatccgtgtaatccaaggaataggttgaacaccttctgcagtaatagaaaacaaaatttgaggtattgtgaataaagaaaaattatggttcagggcattgtcaagcctgtcccgtatattaaaaggttaggtttagactttataaaaagtctgttttagtgaaaagatcaagttccaggctttaaagaaacctctgataagtcggtctatttataaacataataatattatattatattattacattatatataaataatacataattcattatacatatactacaaattgcacctaataaaaatataaaatcattattattaaaattgatttttttgaaggacttttaggcttacaagtcaaacagactttgtaattataaaccagatcgggctcaggcctaccatagccaactctggcctaccctatttccacccatttgtacactagtactcagtggatcatttgagactagatatgttgattgttgaagagtgaatgtactacttacttctgaataaatgattttccaaacttcctttctgcataaactcataaactagaagcctgtttttaccatctgtgcagtaaccaataagtttcaccatattttcgtggtgaagctggcctagataattgacttctgcctgcaaacaaaaagggaagaaaattagtcaacacctagcaagaccaagcagttagaaaacagtttaagagtttgtgttggacttggacatacaagccattctctgtggccttgaaagctttctggtttaagtttcttgatggccactacaattccagtccctggttttgttggagcgcatgtgttctcatctatccatcccttgtagacaaacccaaaccctccttctccaattaagttttcttgcctgaagttcttagtggcctctcttagatcattgaaggtgaaggacttaaggctattggaaatgggattgtcaacatttgatgatgatgtttttaaaggagcttttcgttcagaagaatttgagttctgttttctcttactctgacactttgtgcttcctgagagtagatgatatgcaagttacaatcagccattggagtaacttctaaaacctagtgcagaagattgcactattatgtgtagcatctagaagttgattactagctatgaggtgctaaaagagtgattgattgagcatgcatatatagacatcaagtgttagagtgaatcattggtttttgccacactgcatgcacaaaatataagaacaataatgaaaaacaaccaaaggctattagaattccaaaaaaacatataatgaattgaaagtttttttgctgaacgaatttcatcattgaactaaccccctttacattattctcgatagacaagaattgttttaaacaagcaaaggggaagggagatgttatacaaacatccagtaacatacaattagctcattcggagcaccagtgccttattgttgaaaagaaagaaaaaatagccaaaggaaaatgcagctaatttcaatccacatactagcaactgcattaacagaaaaaagcaaaaattattcaacattatttagaacctgattcagagcgacgaagcctcataatctccattttttcaggccaatattaacacaatacagaaggtttatatataaattactcaaaatacaaaaatttaattcaatcctaggaagccaaggacttgagaacaataaacaaacaagaaaacaaaagaaggtcaattcaagactagctagtcctataatctttcacgttacaacctatgaactattgttttaacctttaccattttgagaacatcgccttcttcttctctccgtggataccaaagagagaaaaataaaatcatccaatataacaaaccgtaatcatatttaaggcatcatcatcatcaacctaagtggcatgaccagtgctaactgatgataacagaaaagttgaagaaaaacaattgaaggctttatactttgtactaaaaaagataaattagaaaaagtgatatagtcatatatatatggttaaagtaaccaaattaaaactgaccaaagaaacttgctgaagacacatgagccactggttttctgcaggagtttcccatgatgaaagttttttctttttctttctcaggccaaaacagcaccaatggtgacaagggtgtgaatgaaatgaaaaatttctccaaaattgtaagtatttgtctgtctgggaagaagtaagaagaaaatgtcaagtgtatggcctttagataaagaagtgaagcaaggggtaactaaggaaatagcgtagtcaattgttattcattgaaccaatgtaaacataactgttttgttcacgttgactcttcaaagattgaaggaagtgccaagtgccccaaaccaggctctaaaatctaaaatcctacctgcttttattaagtattggtaagattttgactcttatgttcatgcacacgacaacttccttaatgcgtgaattgccaacgtgacgttgaaagttggaaaaagaatgtcatctagtaaatggtaatatttcatttgacagcaatggtataattttttctaacatactcaatatacacacatttgtgttacttgggttagttaaaacttaataaaaacaatgatgaaattgtgtaagtataattcctttttctatggttagtctctaataattttttactagtttccacataaaaataataataattaaaaagaacatcacaaaatatattgttaggctttatatttaatagccaacttcccaacaacctgacacgccaaggcactattattgttattattagtatggaaaatttcaaaggtttaatttgttgtcatatcaatgacactgtatcttaaatttgtcttgaaggcatatttattacttgtattactactttcataactagtttcacaacataatacaaatcatcaaaataaaagaaaatgatgattacatttaacattattataaaattaaattttattttaaaagtgatcttaaatttaaatattataaataatgattttatttaatattaatattcatagtctaatgagtggatatttaataaataaaattaatcataaattaaatatataaaagatatttaactttaaataagtttaagaattgatcattcttacttataattaataacaaagaaaaatattatttattatttatatatgagatcataggtagtattttcttatcctaaattaaaaataatttttactgtcccaaaataagtattgtcttgtactattttatatagataataataataataataaataaatgaaatagagtaataattttaaaaaactaattttattaaataaataaaagtagtgttaatattaaatttaaaaactaaaatgatatttattagggatattgataaaaaaaattataatgaaaagttaaatataacatctattttgggataattattttttcaaatgggatatttattttggaaccgatgatttaatgtcttgcctatgaatattatatattttatttgtcatgttctatctaatttcatctgatttgttatgttgttgtgataagtgtttttttattttaaattatttgatgaactttatcatgtaacttgacgtgaggtatatatcaatggttgataatttctccctgagtgttttctgtgactcttttgtcacagtttaactttcttggtcaaatatttctcatttcattaccgtgtggtgtctttcgatgaccgcgatatataatgatcccccactaaataatggtcccctattaaatgaggataaggatttttcttttttctttcttctttcttctttctttttcttaaatcgagagtcatgtgaacatggttacatatggacgaaggaattagacttatgtccctcgtttttttttttaattttcaaatcaatcgggattcaaagtgccattaaaccatctttagttgcatatccaaattaaacctttttagtccaacaacaaggaatgaacatgaagtttggaaaaattcaagattgcatgcatattcaaagtaacatttgggtgacgagaactttctatcagttgttgattccatataagaaagaattcgtacgtataatcaaattgtaagaagtttcatctaacctctttgaatttacacatgtctctcttttaacttttaagataaataatgggaaaaaaaaaactaccaataccatattctttaacgtaactatatgtattaaatattattctctttggtctcatacatgaggaaaaaaaatcttatctgtttaacatgaatataaataaatctaaccagttttattatatttaatattatcattctttaaatactttttatttaattctaattttattttcaatgatttgtttttattcatgataataaatttcaatgaaaaacattttagaaataattattttttatttaagattaataaaattaaataaggtcaaccaactttcttaatttgtgtaaatttaattatctttttcttatatatgagtgtagaagaagtaaattttaggtggatatcactaaaaaacttgattacacaaattattagtctatttagtaagattcatatacatttgtacttcgactgcggtattaattcaccatgctttatgaaccctctccaactagcattagtacctttcctaagaaaaatgccaagtttttcccacaaatatttggttcttagtttggggacagcatattctcttgtgggaatagcgtgtccgcatagaggcaagcaaggaatgtgacgatagttatgtttgaaagtaattaagtaaacaaaattaaaacactaaccagtatcctaaaaaaatggttaagatatttaaaacaaaaatatcttattaaaagatgaaaaattatgttattcatatttttttacgtttttttatgatttatataataattttttttttatttctttaactaatactctaaaggtattggttaataaaacccttaattaaatccgttagtttttgtggaaagaaaaatattaatcaatattcttaaggtattagttaaggaaaaaaatatttataactttttttatatattttttataattttcacaatattttttttaattctttactcaatgttataaaggcatttagttaacaacaccttgtagaaaaggtttaaaaaagaaaagtgtttccggagacagcatcaagccatgaaaaagaaagcatgttacattgttatgtggatggtagacaccatgtatagagggggggaaattttgaatttggtataaacagtacttaattttcaagaggatgaataattaatgaagaacgtgtcatactttgacttcatctctaaaccgtcttagaagaagctctagtactctcaacccattgttagtttctcgtttaattcatcatcaaaaaagtagcatgggcattcttatttgcaatgttgaattgaactagtcccttcccatctacaaatggaaaatgaacgtgaaatgactaagcatttatgtatacaagaaaatagtgtattcggtgtccaatttcttttaatgtccaaaatttaaattattttgagacaaagacaatgttacgtacattttacttgtgctgactttaactattctttctttaattatttaatgtaattacatgtccaaaatttaaattatatctgactttaactccctgaatttttttggtttgtgttgaataaggttagaataaaatcataagatattcattttgtagaataaaatcataaggccggcagttcatttgttttaattacctaatcaacacttttattttataagcttaccaaatcaacacttgacctgttcttgaccgtttgacctaccaattagtttcctctttgatataggagagtgattttatattcaattaccaaaaatagctagcccttgaaatacgtgaggttaacaagattgtagaagagacaataaaacttttttctccaaatgaaattgctaaagtgacgtcgagggtggcttcattggattattataaatatatgaattttaatcttttttatctaatttctatttgtttatcatataacttaaaatatctattattttctctatctctatttacgtttaacatttttcgacttcatcaaccaatgatccaattgtcaaaaaggcgtgtaatcttgtggcataatttgacactgaaaatgggacaggttttacattaccaaatgaaataaaattgatcgatgaggataacatgttcattcagtaaacagaggctataattacgtagtctttttggttacaaattacgttttgtttttggtcggcaagatggttacaaattaagtagtcttcttttatcaatgtggcatgaaattattgcaaagaacattgtataatagaagttctacaattagaatatccgaatatcagaatatgtatgtacctaggaaaataccacaatagtgattccagtgaattgataaagtaaattaatctcattatcaatgagattggctcgctgattttgaagttcacattttagcttattactaagaatgctaacaagtactttcaggataatactaaaagaattgaatgtgaaaacatgttattacttcccaatacacacactgatttttatcgtaactttatcctaattctcaataaaaattgaattgaattaaaatatattgaaaatataaaaaaatattacatattatctaatcatatatcattatttatgataattttattgacttatataaaataattattttaaaaattatatttaggatgatatctaataagttgatagtcagactcagagcacttcaaagaacaaaaggcccagaacacaacactacacggcaaggcccacattccactcatgtccataacctattatagagcatagattttcgaaaatagagcataaaatctctcactttttggaattcacactctgcttcagcatgtaaatgaattaaaatgcaaaagagtaatggaatgttgaattaaaaaaaaaaaaaagtgaaattaagatagaccagaatgtaaaagaagtgtagaaaactgaaaaagggtgtgaaagaatcattccgcaaccatcatacatacacccaaacccaatagcatcatgttgtccatactttttgtatgggcactcgtttgcactcgtttgaaaccaataaacttgtgctataaaaattttaaggcacgtttaacattttcctttatcccatagtttagctcggctcatttggttaaataaaatatatgagttattataaattttctcataacgtcttcaattcatactactataaaaagattaattgcctcacatacaggaaattgaatgcatattaatatgggaactttcccgtaaaattcaatgatgaataattgatgcatcttgcaccacctcgaccacatcaataaataatattaattatgtaactcgtccaatattaagtgttgtcctatttttattttacacaaatttttaaaaataaaaaatgtataacaaatttataaaacgaactttactattattttatctttaaatatctacgacatcatttctctactccacagtttcattttcaaaggaattaatttatttttttgctaaaaatgatgtaacacaacattatttaaactaataaaaaagtaacacatcattattttttttttgttggccattgtatttctccactgagaatcaatgaaaaattcttcaaaatactaaaattcatttaaaaaagtaacatcttttaatatatatttgttcatatgcacaaaaccagaaataaactcctaaccatgtcacaccaaataatctcttgagttccagaccagaccaaatttgaaaactgaattctacccttataccacaagcccacttccttttgttttttttccccaggggaatatggaatattcttcggttcttaatttcttgcatgtgagaacaagtatatcaaattgtttaccaattagtcctctcttaaaatatttttagtgatagatcttaaattaagattttatattattttttggtagacttcttagtattacataggattaaagatttctttcatttttcttctttaatgatatatcttattttaagattttaggatgagagaaaaatgaaaaaaatttattcttttttgaataatatgaagattttaaggaatttttttataaaaactcattctctgtattagaaatctttctaactcctttattaagagatttagaaaaaattagatcttaaattcaagatcttgtactaaaaatactattagtaatataaaagtcaagcacaattcaaaatgaaattccctatatgccgaaacagataatggttgacgaaaatgtacgtatattgttttttaatgttattcatgcacatctttgattaattagacaagccaaacgaacggtcccaaagttgcacggaaaacaactccagatcgagaagcagttcagtggtccaatgaaaaaccgtacatctatttcaatttctttaaaataaattgcacatataacttttctataattaagttctcatttttataaagacatcttcaaaccacatgtcccaaacgtaaccacataaaccatcaatgggagacaaataaatcttctaattgaaaaattctcacaactttaaaatgaattttaacttgtcctccaatttttgtcttaatttacaccgtaaaaattggactggttatccaattgaaaactagacattcaactaggagtgttcgtatattgattgattggttagtttagatttagcgtaaaatcaagtttgaaccgataatatttaattgacttaacttgattcgaattttgaaagaaaaaaaatgggtcaatcaaatcatattaaacagattaaatattactctagttaatttatacaataataatctctcgaggtgcttattttatgtcattaaagctacaaatcagtgtgtagatgattttgtttgcatcatcgagttatgataatatatatatatatatatatatatataatgtttttaatattttatatatacttattgtcttttttttgtgccatgaatatatgattgcatcatatcatcaagaaaaatatatgattcttttttaaaaataattttaattaccttttttattttaaaataccagagagctaaatataagaaaaatcgattatctcatataacttcccgataataatattataaatcattttaaaattaataaaaaaatcaatttgattctaaatattagacgatgcaaagaattttgaagctgtagttcgactttctccctaaatttatatcatttaaatttgacaaaactagtttgtaattattttaaccaatgagtttaacttgatagtattgctcagaagaagaaaaaaagtgatagtattattatttataaaaattagaagaaacaaaaaaacaaccattcttcaagtaaaagcctccaaaaaaatgtaaaatgaaaaaaaaaatgtaagttcactaatagatgagttatatatgattcaccattaagcacgttaaagacctgaatatacaatagagttaaattaaatatttagatggagaaccttactcccataatggttttaacaattatatgctcgaatagaattaatctctccagtacaaaatacatgtgtactgtagtttagataaaaaaaagactaatcaatgtatacctaaaaaaaactactcaatgtaacttagatacaaattataattaaaatgtagatgaattaaagtaggaaggaaagaagtgcaaaaatttatttttgctcttttaattaaataaatggaatagagaatgaaaaataaataaattatataaaaatattttatattaattaaaattaactagaaaatgaaaaagagaaagactattcctctctcatttaatgccaatttaaaataaaattattttgtggtgagtcctatcaaaataactttcctcctttgtatctcttcccttaaatttagtttttttttcttcttcttatttccactttaattatttacacccaaactgcaacaacattatgctggctctaggtgtacgaagagtttgttagatctgatctatttgtataggtctgcatgcatgatatatctagaagaggatagtctctatcaatgcatggatcttacatatatattattttgaaacataatctaaaattccggaaacagtgaaatttatgctaaatttactttgttcttatattatctttacatgataataacgatgtgttatatcttatatgtacgtaagacacaatatttaattaaaccctaaatctaagaggccggttttgatattttttgtaagacatgaagttgttctataataagcaatctgcacaattttgtaaaccctggtacagtgtttaggctttgctctttttctgaatttttggtaaggagttgataggaacatggccattattttcactcacgtgtctgggacccaacaattagtgcagctgtcgtgtgagagccaatattagtggacatcgtgtaaaatagattggctgttagatgcagtcattagatgattgttcgatattattgcatttattaggatttgtacttggttgttgcagtatatagcactagtctcacgagatttactgtataatgtttttttttttctctcgtacggttagtgggtttttttattataaaatctttttaaaaaattatttatctatttatttatttatagattttttttcaatttttagatatattaagtattttttacatattcttgattattttctctccaaaattaatgataaatataattaagtgaatagaaagataagaaaataattattattttttaaaagacatgaattaattaaagggattttataattaggaaaaaatatttattttcgttgaaattggttggttagttaatttgtgctgattgttattattactactaaaaactctataaatagcgtgtaaacattcattttacatgctatttattcaattatgagcatgtttgaaaattcgatgaaaagtgttttttgagacaaaaatattttaaaaaaaaaattgtttttatttttatttatttttatccattgaattttgttaaaacatgcatcaacaatttcaactataaatcaaatgtatgtagatgcactacatagttgattttgatgatataggacttagttttagttgaaactagctcgttaacaggttgttaaactggttttggatgttgcttcaatatttgacaatctatttttgtagttgttgtataaacaagtggaacctgaaaacttacatctttagtatgtccatctgaagtgagctcaaattgagttgttttatcatcttgcttgtgttaattatgatatatataaaaaaattcacagacgacaccaagtcaccaattatactctaagatggattgtactaacgtgttcaagatggacgactaactatgactctgaactttggtgagtgttgactgaggttgacttctacgtagactgaagttcaagagctttagatggtggtaattaagctctaaaatatagttaattaagatattgtgtaagtgaataattacttgtaaaaatactttaaaacttaattaagttattgaatattataccagagcaactctacgtaataaaataataaatacttatatgtcataatgacgttggtttatttataagaatttgagattgtctatattctacggcacaaaacccaaggcctcatgtgagcaataagactctttcttggcatagcaacattataactttgcttcaaactaatgtgtaatttgtgattcgcgaaatgtatattagaaggcctatacttgatgttaacttcgactcttacaatttgaattaatccaacatagaccaaagtagatcattatgtaaattgaaccttaaccgtaatccaaaacagggaaaaaccaatttttgaaaaaaacttcataatcgtaataatatttaaaaaggtaatcttataatgcacaatatagtaataacttctataaaaaaacatattaatagctgttagtaatctgtccaaaaaaattaactgttactatatagatgaactcattcaattattgaaaaattagtaattgtatgtattttgattaagacaaaccaataatgttacatattcttaaagaattctctaatgcccataatttaaaattaaaaaacaaatagtgtcaccgctttataaaaagataccaattcattagattgtaaatatgacctcatttccccaatatcaataatattatgaatttgcaaaacaacaataatgcaggagactcctatttaatatattagtgctagcaatatagcattgtcgttcgtccatacaagtctcagtcattaacaaaaaatatatataaaaatctcagtcactgaagaggtcaatttaatacgagtgttagtggggaacggtgtgagaagtgcaagttcggtttcaatcaccaatttttcaacaagctacaataaatttaaaaaattaattttaaattattttagctcggtttttaatttttatatttataacaaatattgactgtactttacatttaaaaatatttacttttttttaataatttttataaaataataagaaatttgtaagaagacatatcattatttattaaaaaataacacgtgactcaacgaggaaagaaaaataatgataataatcacttgaaagatgcatttcattttaataataagtgtgctaattagccacgctaacagcgatatatagaaccttcctagttcctaagcaattggagaagagagaaactttaaagtatttgatttgagaatagaactttcaaaaactgaagtatatataatttaaattcagaattaatatttcaaatcgaatctaataatacgtatcaaaaaagttgatattgtcctttactttcaaaaactcatttaccttaagatcaaaatttaatctgtgatgatataatttaatttatgccttattattgagcatatgaattaattgactgagatttttttttagacaaaatagactgagagttatattagcttaatcattcctctcgaataagcatatcgtgttgttttgtttagtagttgttcttgagcttttattttccatgcttctcattttgagaagtttttgtgaggattttttgaggttactatatgtaaacatgatgtgtatcctctgataaggttttggaacacaccttgtcggtcaaatcttttaataaaatttgcctttaaaaataaaacaattattctcccacacgaatggaaaattttgaatttctagagacgtaaacaaacttttcttttactggttccaagttctaacttctattggagcctggcttccaaattgtattgctgatggctctaaaccattaggattcggcttttctaaattgaaagaagtaattttatttgttgaataaaaaacaattattgattttaatgtatgtatataataaatcacaaatatattataatattcaccattaattttcttatcaacgactgaaattacatattttatctttcataattttagaaaagtcaaatctaaactattaattgattgattaggggttgtaatatttgaacccactttaatcatgtatttatatttttatttgatataataacatttttttagatacaaaggattaacttttaatatatttttatttcatgtgaatatagaagcgttcgatataagttcttcttcaaaaatctgacccctcttttttttaaaaaaatgtgtcattgtgttaaaaaaaaaaacgtttaaggtctctaataaattattgattttttttaacttttgataaaaaaaattattattttaaattcctaacatattaaattttttgttaagtccttgtcatcagattaaatgatgatgtgataccatcaaaatcattaataatattaagaaattcagtctataaaataacacatcatcacttaattaataataaaaaattaaaataaaagttttaatatatcaaaaatttgaaataacaaaaaaaattattaaaaattcaataacaaaatttgataattgaccagcaactttaaacatatttaaatcttaaaaaaatatcttcttatttccaaatctcataaataaatcattaaaagaagacaatttaacagcattctttttaagaaattaaagaaaaaatgcatgtcaccctaatctatcaaaaaattgtttcatacgtttagtatttcaaaccattttcaagagactcatacgaggtggatcgatctcctaagttcgcataagatgcaataagtacataaacgcttaaccttatatattaaaatcacgaaaacagatctcgaagtttttattattttttattaaatcaagggtagaggatgtgacgacgcgaccatgggcaatcgagtatcagcaaaaattcttgacgtaatggttgcatggattcaatagtcatagtgtttttttttttttccttaatcataaaatatagtttgttgtattatattacaaattaatttgcacgtgaaatagattgtcataaaaatttctgttgactagtaagtagtaacttatgtaaaataatttttgaagtagtcaacttttgaaaaaatttatagacaataatttgtgatcaaaacagtataaaatatctttatatttttaattagtatattttaattaaattattctacaaaatattacttgcattaataaactttgcatagtacctgggataaattatttttaattcttctctatcaatattcaactaattaatattacttgtattattaaacttcagatcgtatcacgttggggtggaaatgggatgtaagccttatataagatgaataaaacttaagatacattaaatatattcaaagtattttttttggtggtcatatatatttttaagtattaattttgaatcaaaatcaatatttcatttaataaaaaatttattttaattaatgagataaaaaaataattatcaaaataaatatcattttaaataaaaagttagtaccaataatatttattgtatcgtatctatatttatcgagacttaatgcgatgcactgttaaagctcacgtagtcacggtacatcttgtaaattttattccttcgagttggaggtatatgcacctatatttataattttggttacaattttcttgatcaagcattcgatatattttcaaaaagaatatattttaattttatccgacttttttttttgtgacaactacacattctaattttgcattttttttcgtgtcttcaaaataattttctgaagtaaatatttgatacattttcgtgagagtgcaagagagagtagagccaccgtccaacttcttcgatcccatggtggccccattgtttttttttttttttatgtaacttttttctaataatttgttaagatatgttagatcttgaacttaattgtctatattttatttatcttgatggcagatcttgcatacttgctgttcttttcatgtgcttgttttggttaatttatttttaatttatcttctattattttttttaacagaagttgacatatgttcctgccaaacagtggctgggcactatgctccttagtcgtactccttgtttttattcgtctcttattccagtgttcggtatattccggatagtaaatgctaattgtacagtgatcttcatatggaggatcttaactttataaatattcaaaacttttttattttatcaataagttattaatttgaatggtattagatttgatctttttaaataaggtcttgaatttgagtcttgtaaattaatgaaaaaaaaacgtaatttgaaaggaaaaaatctcattaaaaatgattaatcaaatttttcaacaaaaattaataactcataaaaataataaatactctgtatgtaccaataccctaattaaataaattaaaaccttcttgggccttcaagaacaaattaccatttagtttacctctaagcattattaaagggtctaacctcttgctgcctctaattaaggtcattttagccttatagagagccgtacaggtgttcgactagagtaactgaacatctatatatccagtataacatgtctgattgagtttaatttctgcttacactagttatgatttgggttatcttcttatattttctttttattcacatatgatattaaattattgttgaggttaatgatatttagtgactttacaaaggaataagtcttcccctaatttaaactgtctgtaaaattaaaaaaaaaatggaaaaatcaagatgatcttagaagtaagagaaattttagatatactttaagttgccaaacgaagaactatggcagaataaagagctatttccttgttcttcaaaggaggaagattccaatttcccttcttctacttattggtgtgccaacgcatggaaagaaagaaacaaattaaaactgactcaagttaccacgaaatgaccccacccccattaaagttaaagtgttaaacgcatgcagtgacaggcgcaatagaactttggtttggatgaactttcgatcttattaaagcattcactatggaacctttaccacacgaatgggacaagctattgaatgagttgtgggagaagggaagcagggaaaaatggctgaccaagaaattaagagataaccatgcatggctatgacttggttaagggaatcatagtttaacatacttatggttaattagcataaaacattattcatttgtttgggacaaatgtcaaaagaaaaaaaaaaaaacgtaagaaagtatataaatatttttttatcaacaaatattaatgattagtttttgttacttgaagagattgaagatgattttttttttccttttttcttaatcatttgacccattttatatctctatttaagaaagtatataaaggtggcccatcactgttttgatctttccattttgaagagaaaggaggaaaaaaatcatttttgtatgattataataccaaactattatatttacacacttttttttattaagaatatatatttattccagagtatataatatatattttctttccttctattttttatgcaatcaaataagaaaaaagaagaaatttatggtgtgtttgaatatcatttttaaaaactgttattagttttcaaaaactagaaaatagaaaaagttgtttggttggtgaattaagttttttagttaagttataatgaaaatagctattgattttcaattgtggcatccagcttacctatgacttcccgtgtaccaaccttcctgccaatgccatttttctttttttctatatacttttatcttcttttttctccttgagaacatagtgtgcttgctattttaaccagctgatatcttaacccatttgttgttattgagaactgaaaaggaaaatttctttaacttgtttctgttttatagtttttaaaacactttttcataatagtttttaaaattcagtagatttttaaatgagaaactgattgataagtaaaggaaaaatgttttgaaacaaaaaaaaaaaatgaaaagtaaaacaaacaggcttttagttttttttttccccttcattttttctctttcaccaaacaacttaaaaaatgtcaactctttttttttctcttaccaagcaacttaaattgtttgagaattaaaaagtcattaacaaattaaagcataaagtatcaatcactatttaactctcaaaatatctcccaaataatcttgtttttggcgacccgaaatataaattttaataataaaaagttatttttgtaatccttagagtatctcaggcacttgttgctttgcttaattaattacttatttttataatattattgattagttgtttttaacattgcaagtgattcacgtgtcatattagacaatattgtttctataagcaaccgttgcttttgattaacaaaaagttgttattttaatggtggatcatttaagtgtgagtcattaaggagtggattatttaaggattacttaaaattatattactgaagcaaaatgtgtatgagttgattaaatataatgtgatattgtgaaagtcgattaacaaaaaataaataaataaataactcaaaatgaatatatggagatgctcttaatcaagtcaatgaagaattttggtagttgcaactgaaaagcaggacgtgattagaatagtaaacaatgtgccacaaacacatagaaaaccataaaatagcatattatgataaaaattcattggctgcacaacataaatgatcccatttgaagtaattttccacaaaaatattaaaaaaattatcatcaacattttgtttcggttgtaaaaaacattttattttaataactaatattaaaattagtacaaggaaaatttatggatataaagattatttgttcttataattaacatcatatttatttattacataaattttacattttttattaaaaataatttttaagtgtgtaggagagataataggagattcatttcctattttattttttactaaatgaaataaaacttaaacattaaccaaactaatataattttatgatgaattgaattgggttgggttataattgatttaaaaaaaaactgattatatgataaatttgtaaaaatgataaaattgaattgagtaattccctccctcaaatttaacttaaatcaattcccggatacgccaatagtggattcacttgattgagtttaccttaagtttgacatatgtcaaatataaaaactaaaatgtttttattattatttaaatgaatataaatgatattttaatgtttttgtttgtatctctttataatttacttttacttgaaaataagtttttaaaaacttatagcaattatataaaaaaaatttaaaaataaaaaatttaaaactggatattttaatgtttaaaaattaaatagtaatttcaaaaaaacattgttgtttgtatctctttataatattttgatacaatttaatgaattaatttagttaagttagtattttaaaatttaattacatcattgagtggaaaaaagtaaacaaatgaatcgagtcagagagtctaattaaatcagaaatggactagaaatttagtccaattcatattttttttacaaatgttaatcaattaactaatatattataatacttattgaaaaaaatgtttattaaatacatgttcaatatatataaaaaaattaatatttaattttaaataattaaaaatatatatatttcgattatctttctttatatcacttcacttaggtaaaaagtagaaacaacatatgcatgctgtcttcctacaacgtgtctcacgactcacgagaattgctaaaataacgtttttcttcaaccaaatattttataacactccttagaaagcaacttgtctgtttcacagcctgaactaactgcttgaccccaattactatgccaactctctcacattcttattttcaacagttattaacttattatctctctctaataaaatcattaagttttcaatagttattatctctctctaataaaatcattaaattcctcataaatgtaaccaaagacgttaaaaaaagagtcttactaacaattacttttaaacactaattaagacattaaaagaatattgaatataaaaatataagaaaataaaaaatcataaaaatataatattacacattttaatataattattttttaattccttaacatcagtgcccttaccactcttaccgtgcacttaacaaactaaaactagggtagtggtactaaattatcagatttagtgatgacattgaaacattataccaaaacaaacctggctgttcaatccatcattattgtttctgcaaaaattgaaatgtgccaaaacaagtggcactgtgatttgtgaccacaacaaatgcacgggtcattttatggttcagaccaatcaaccccagaaatattctctctctctctctctctctctctctcttttttccacacatattttattattattattatactattagacatacattccatgaaaacagataagtattgatgagtagatgtttcaagttgttgttcccagcataaatagcagaaaatgagaaaataagaaactctctcatgagttctgtctgattgcatagcattggttggtaagctgctcaattatcaagccaaccttgcttggttccactgcagaatttcagtttattcttatctcggtagattggattgaagtatttcttctctctctctctctccatctctttctctctcttcacttttcacgttttttgtttttaatttttttttcatcttcatgtctatcctcttctcatatgagtctcaaggtgttgtatatataacatgctgccatgtgcagcttgtgtggtacttgaaatttgaagacttgatctgcctttgctttgttatttcattgtcagcacccctctgggccatattggttacctcaactgcttttctgttcatccttccagaattattgtaaagtttccttttcttttttttattctgtcttttcatttttttttcaaagtgaatttctggaattttttgttttcaattgagggcacaaaaaataaacaactgactggaatttccatttgtcttgcggggtccctgagatttgaagtgtgttgttttccttttggtgggtggatcctaagttcctgaattccctcttttccccaaccaatttgtattgttgctgaataaattacttctgtctggcaaaggttgttgagtctctctagtgctggaaaattttgtggtgattcatgatgttttttttaactgaggaccttcaattttgtttttgtgcatcgatggttttctcacaatcacaaatctagtctccaaaattggtgatttcacaggggtgtgctgttaattttcctgtttgtttcatcttcaagctcaattctggttctgggtttatcttttactggaagacagactttgaggttatttctcatcccaacaattgttctcttctcccagcaacttaaatcaagtatcaatgggttttaaatttctccaagatctctctagtgtactgcattactagtcaaaactcaaaagtgggatctcagggtatatgctgaaaatatattgagaactgtttcccactttgcatccttttgacattgaaactactactttgttttaagagtttaatttgttgtgcatggtcattttaccctgtcaaccaatcagaaactcatcctccatgatagtttgtaattaaatgatagggtaaaaactctttatagtgactgtctatacactatttactcttgttttaaaccataagcaatagtagcttttcctagacatacatcacacaagatttggattaagtttcttttttgttgaatgacttaccctgtggataaaaaattgttaggaactaaattctgatatgcgtttcaggtagactccttataagtgcgcataagttcaagtgtagagaatgagtcagcctaagattaagcgccgagttggtaaatatgaggtggggaggaccattggtgaaggtacatttgcaaaggtgaaatttgcaaggaactctgagacgggagagcatgtggctcttaaaattcttgacaaggagaaggtgctaaagcacaagatggctgagcaggttgaatacttgagtaacctgggatcttactctgccccttaatcttattacttcaattttagaaagcataaatttttataacacaattgcttcttcacattttccaaaaccagacaaagcctattttttgctgaactaattttaggtgggaggttataggtttcagatgcttcttattatagtattttatattggtagttgctttgaagtcaagtctcttagattagatgtttctaatgtatttttgcagatcaggagagaagtagctacaatgaaactaatcaagcatccaaatgttgttcgattgtatgaggtctctctctctctctctctctctctgtggaccacacacgtgcaatgatttgtctctcttttttaaatcacttttttctttattttattcttgccatgtagtttttctatttttaatagctgcagatggtagtggttgagtctagaactttcttgtatgtttcactaagaattctgcctaatgcgtgtaccgttccagaaaatgcataaagtatcttggtaaatatttataatcattgggtgatttggaaggttgtttttttatttataaaattaacaattagcttgttcacttgattatggtatatttcgatgggaggaaagaatatagatataaaagaaaatacagataacattcttttatttagttgaagagatagtggaaagagaaaatggagaaaaaagttgacttctagaaataaaaattcaaacttttttttaaatcttttcttcaattcaaatttcaaatttttctcttctcattttctccccaccctaccaaacatagggagagttccaaatatgttgaatgcttgaatcattattattaaactgctgccttttatccaaggctaaacgagaccgaagaaagctttccaatcctctgttgctactggggttgagatattcttctatcatgaattgcccacgtgatgaatttttttatatatgtggaaaaaaagaagtcaggagttaaaataaatacgtgttaaatacgtatttcttttcagagttatttcattacttcaactcaccattatcagtccatcgggtaattaatttgctgatggtgctgttttgtgtgcttgtcatctagcatttgtattagtgcatactatccaactaaacagaaatttttgaaggaagtatatctgctaatagaaataaaattgattctcagcacagtttactttgttgcctaattctgtttctgattttgtaacatctttttttgcaggtcatgggaagcaagacaaaaatatatattgttttagagtttgtaactgggggagagctctttgacaaaattgtgagtaaatgaatcttcttggctattttcaattgattctagaatttttggaggaaaaaggaacacatagtgactcttttaacacatttgcagtcgaccaaacctctttagcttatgatactagattagtgttggcaaccagaatatgatccttgttcattcattcaatcatgattatcaatttatcatcatcattcattggcattgtagtggtcctggtggataggattcctttggatcttagtacatgctttccatctttattacatggaaaaagtgttgtatatgaattaatgaaaattttgttgtaaaggtaaaccatggaaggatgagtgaaaatgaagcacgtagatatttccagcagcttataaatgctgttgattattgccatagcaggggtgtctaccacagagacctgaaggtaaggcccctctgcctctctctctctcatacacacacacacatgcaggtgccacgacaattattttgagtttgatacaataagaaatgacttctaacatttctaattgttcacatactttctgcagccagaaaatttgctattagatgattatgggaaccttaaagtttctgattttggtttgagtgccctctcccagcaagttagggtaatcatgaattccattgccttctgacttttacttttctttggtatttctctttgttcagtaaattgatcttgctttttgaagtagaactatgacccaattattgatgttgtaaaagaacataaaacaattagaaagtatgaagacatacgagataagtggggaaaatgcttatcttattcagctgatggtaaaatatatgtttagttctaagaactgcataaagaagatcaatcacacaggaagataagaatagtaataggtgatttattttaaccagagacatgatttgatttgtcttaataatttagggatggatgagttaggaggttatgccaatagtaggtttaagatttaggaagagaaagcataccatgttttgagtgtgacattattgaagttggaacaagagttgacagtgtcagaaaattgtattcaatcattcattcatcattcataaatattaaaatccttttattactcagttatcctgtgccatcaattctttgatacctctccagaattacataaactatgtacaagtctgtgaaagggaaaactaaataattcacattggtaatagaaaaggccacaatttcattctcatggaatgtgtagacttgcaatttttgagtttaagaagataagaagaagtggttatcaagtaccattgttcccttttattgtaattgatgtgccaaaattagaatttgttttactttactcgatgaaaattaagctggatcctgtctaagacaatggtctctctctctcttcccaacatgtcaatggttataattttgaacatattcttataatattgatgacaacatgacgaagttgccatgcatccaaagatgtttatttttctcttgataggatgatggacttcttcatactacatgtggcactccaaattatgttgctcctgaggtacagacaaatgttatgctactttcatgtgaattgtataccgaaatacatacattttgagtcacactcctaactatatactcttgttatatacaggtccttaacgatagaggctatgatggggcaactgcagacttgtggtcatgtggggttattctctttgtattgattgcaggttacttgcctttcgatgaccctaatcttatgaacctgtataaaaaagtgagcactgtttactctcttcttcaaaaatttagtttttcctttgttttctgtttattatttttcatttcttgatccacagatctcagttgctgaatttacttgccccccatggctttctttcagtgccaggaaattgattacacgaatcttggatcccgatcccaccactgtaagaagcaacatttgattatatgcctgcttcttgtcatgtaaaattgatttttttttttctgaaagtaaaagggtcattttacttataacaagttataacctgcatttccttggtggcttccaatgatcactaaggacaaagtttttggcctgatatcatctgcatcagtttgatttcttgattatgcaaatcagtataatggttcttctagagctacatttatctagttctctgcaccacaacaaaagtgataaagaaaagataattgatcattgataatcaatctacagtatcatggtcatttttctgttctagttaatttttttggtcttgatttctgatttatcctgattgtatggcagcgtatcactatacctgagatattggatgatgaatggtttaagaaagattataagcctccagtttttgaggagaacggggaaaccaacctcgatgatgttgaagctgtctttaaagattctgaagtatgttgaagattattagatctgattttggtattgattttctgttagtttagaatcttctctcataaaggattttgcctgtgtattcaggagcaccatgtgacagagaagaaagaagagcagcctacagccatgaatgcattcgagttaatttccatgtccaaagggcttaaccttgaaaacttgtttgatacagagcaggttcaaagcttcacatgataagatgctttctaaagttttttattattgtgatgaacatttaaatttttacatataaactagtttctttgttagataaaaaatagttaattttgttgaaacttgaacttaatttggatgagaactttctttcaagccaaattggtgatgattatgagagaccttgctaaagttaccatgcttgctttattcttatgtcactgaccacagggatttaaaagggaaacaagattcacctcaaaatccactgcggatgagataatcaacaagattgaggaagctgcaaaacctcttggctttgatgtgcagaagaaaaattacaaggtaaacctatccccttgacaaattacaagcttctactcagaggggactttctattaaataattgtttgtaaaattaataaatcatcacctcctgcagatgaggcttgcaaatgtgaaagctggaaggaagggaaaccttaatgttgccacagaggtatatgattggtttaattaatcatctgtttcctgtacctttgtcaacttttcattttagtccctatacataaaaactcattattttggtccctatacgagtaatctcttttaaattttagtccttatgtctctatttttagtggttttacactgccaaaaaactaacacaaactaaaacataaaacaaaattgctcatataaggactaaaaagtagcgaaaagttggggtaagtatagggaccaaatgattaactaaacctgtatgatttttttgttttgttatttggtgatgtgggacactatttatcacattattgtactgaaattcaagtacccaatcataaacagatattccaagtggcaccttctcttcacatggttgaggtacggaaggcaaaaggagatacattagagttccataaggtatccttctgtacccttctttgcttaattgtgttactgcttgccacttcaaagataactcttctattttcaattttaaaaataattaaagaagcctattatatcagcagttgggtgggaataagagcatcaatgtttttcattttgtcaatatcaactttttttataattaataattatagcaataatttgtttctgcctagtttatacttcctatttgtgttggtacacaattacatatttgaataaaaaattatgtaccttattgttcggaagctcttcgttatgcgaaggtaaaggggagggataatgtacgcagtcttatccttgcatatacaaagaagctgttttcggattcgaactcatgaccaataagttgttaagacacaattttaccattgtatcatgacttgtctcataattacatatttgaataaaaaaaaaacttgaatcaagtttcttatatcctcatcaatcatcatcaagttcttaaattaaacaatgacacgtggattttttttcccaatgattgatatcctccattagaatatgtggctgaattaggaaaagttttgtcgtttatttgacttgagaacttgatgacaaagacataagaaactacctaagttttgtcgtttgaataactaaatttagatcctcttgttcttgaataattggagacagattgtaatttcaattgtttgcttccaccctctgcagttctacaagaaactttcaacaagcctggatgatgttgtctggaaaacagatgatgatatgcaaatgcgagaaacaaagtgatattgttattgtcattatcaagtgtaattttctttatgaatgaggttctactattttccaatttcttcattcgttatttcctcttaattaggttccttcgtgtagttttgtttggatatttaattacatattactcatatattgcgtaccatgctattattttttgaaagcatgctgagttcatgttagaattttactcatcaacaattgcagttatgttcatgaatcaaaaaattgtaagaaaagttgtatatatatctatcttccttttctcctagtaatatcttttcaatttgttgttactttctgatatgtagccatatggtaagctgattaatcggaaaatgaaaatagatgattgagagaaagaggttaaaagaaaatgttattattctacaaaatataattgcccatgtctgaattgatgctaaagaatagaaggaagtagatcgaaatataatagagcggaatgaattagactaaaagtgtcgttccgtttaaatattttttttttttatatacatttcattgtttagtaaaacgactaaaagagcaaattataattttttaaatttctgtaagactttggtgtccaaaaaaattttccatataacttttactttaaaaatattttataaactatttattttatatccttaattaaaaaatacttttcaaggaaatgatgtttcataagaaaatgttttttattttaattaatttttcttatgtatagtataaaatatgtgaaatcttttatttttcaattaaattaaataaaacaaaatatctagtcaagctgtcagactttataaatttgttaacatgacacccaatccattcacttttgtgtgcttatttggtcagtggttagtcatagttaattctatattttgtaaaaatgtttaaagtttatacctgactgattttattttgggtattagtaaggcttgataaaaaaaaaaacataggatcaggtcacttctgcatcctaaccatatacttgtaaagtgatgaagtgatagttagatttgtaatttgcttttgtcttcttggttaaatatatttattatgttttgcatgtatgttcttatatttttaacttgtagttaattatacagttttaacgttttaaatatatcacaattaacaaataaaatattttatttattattttgatcacatgataattgattattataattataaaaattattccagagaatgaataaattatttaaagtattatataaaataaaaattaatataagatttaagatttaattaaactaaatatatactcatggtaattttcttaattttttatataattctgtcaaattttgttgaaaaataattaaaactgaaaaataaaaaaggagaaaaaatcataagtagaatgataaaaaaaaattgtttatttagttaatctaaaaatgatagtatatcttttattaatttttgaattcaaatttatttaaaaaattaaattaattatcaatcaaacactattaacgtagttaaatatatctaattaaaacaatcaaatatttaatatatcaaccaaattttaataaattataaataacatgaaaattaatatttaatgatattttaaatcacacaacataccaataatgatacggtcagcccaaatagcttgggctaggatcagttttggacccacctagatttcgtaatttaaatcacacaacataccaataatttaaatttgaaaaaaaatttaattactacatttttaaagagttgaatgcatatatattaataatataaaatatatttttatttttattcaatcataatttactatttgaattacttatcataattgtgattggataaatatgtaaaaaaatttacacggtcagttcatgactttttttttttctttattttaaatattttaaaattttaatgtcattcttaaagttttatttcagtaagtcaggcaataaaaattaacattaaaaaccaacgccaaccactgtaaaattttgattttgagtgaatgataatactcaaacatacctaattgtctaagttgtcctggtcaagcgacaaaaatcgtgatgacactttaggagcattttctttgatttggattaattggattctcagtgagaatctcttttccctttttctcttttcttttaactttgcatttattttttaaagtatatacaattctgcaatatttctttctattttcaaaaatgggaagacgtttgaacggtattgcagtcaaattcttatatgaaccttttttggtgggcatcaccatcatgaagcactcacagacacagccatgaatgttaatggtgggccaaaaccaacaaaaaagttcatcatttgtgtgatttttaaagcattatattatcaaccaacaaacttttcaacaatatattttattatcaaaagacaatgtaaaattatttatactattttaggtgcataaattatttaatcataagataaattacataacatacataagcgattatttgacaaaataaggtacgtagttttcctaataaaataattataatacattacttggttggtatctttttttaacactttattataaattaatattttccactaattttttttaaaaaattatttaataaaaaagattaacatgaaattttgtataaataaatgctataaagagtgttattatttattaataacaatttgttcatgattctagaaaagaaaaacaaattgtctatgatacgtttacttgtttaaccaaattgttgtatataacaatttcttagaacgttaaaattgaaatgcctcactcttattgatttccatgctacttcatgctgcataggtttctgtctcttccattcgcactactataatgtctcttttatttgtttgatgatgatgccaacagtgtcactcaaacttgttttcaaggaaccaacattagtcatttttttccaccatcaagagacttttatttggcagtcaatttatctgaaatattttcttcatccttcaatctactttacttgcttgttaggtaaaaaatggtatcttttggtgctgaatatcatattggaagcgcttttacgtgatgcccggtatttcgtttttgttaggttttggtttagggtccaaccaagccaaacccaatattatgctaccctcaaattgctaactttccatttctgcaataatattcacattatggattggtgaagtctgtttttttttttttttttttattattatcctacgcttgaaatataactatatatcccctgcattgtccatttccaaccaatttgatttttctgatgttattagaatcaatggaatttatatatgtaatttgtgccttctgtgtttgtattttttgttctttttaattgttgtcatttaactgtgtattattagttgctgattagatttatatgattttgattctagttcaattggtttgttgatgtagcttaaaaccttgtttgtttttgtgtctgtgtggatgatagaacttcaggactaagaggttgttgagaagatggttgggaaccctgcactccatgtctcatcattgccaacttctttttcttcatctctgattaccctaccaagaaatccttcaagtttcatccctcttccaattcgacgccagacacaaatcaacatgacaagagctacatctgctgattcaggtcatggccaaaggtcatcatcatcttcttcagaagcaaagaaaccactttcagctttgtcaaacattccatgggccgtttggaggcaaacattgcggccattaagtgatttagggttcaatgataggaacatctgggaaggtggggttggactgtttctagtgtctggtactgtcctatttgttcttagcttggcctggttgaggggcttccaaatcagatccaaattccggaagtacacagtggtgtttgagtttgctgaagcttgtggcataagcaaaggaacgcctgtgagaatcagaggggccactgttggcaatgtcattggtgtgaatccttccttgaaaagtattgaagtagttgttgaggtgtctttcaattctttaattgagcactttagtatccctggattaaaatcttgcttgtgtttgacattgtctgtttaacgtcgcttgcgtataaatttctccataaacatttataagaggagaagaaaataagattatgtttctgctgtgaacgctgaataaacgctgaagtgcataagttgattttaactgatggaaaaaactcgactctgtttacctttaccttttattttcttgtcgagtaagtgcttatggagaagtttatctaagtaggaccttagttgttgaattgttttattaaagcaccagttttccatttgcaggttggtgacgataaaacagttataccgcgaaattcattgatcatggttaaccagtcaggtcttcttatggaaacaaaaattgacatcactcctcgtgagccaattccaacaccttctgttggccctcttcaccaagactgtactaaggaaggtttaattgtgtgtgatcgcgaaaagatcaatggtgacaaaggaacaagtttggatacattgattggaatttacatccgccttggtcgcgagatagagaaaattggtatcatcaatagctatataatggctcaacgagtattttcgattattgaagaagcgaaaccacttcttacacaggtgtagtgctcttgaatgaaccgttggatcaaacaattttcttgccaacagaaaaatagataagttcatgatgataaatgaaatattagtttcttctatctccaaaaacataaaataataatggtgaatatgcatgtatagtacccttatgacattgtttatcatctctatgcagtaggtatttgtttgtttcttttttattattcaatcattctgtcatgcattgatggctcagatcaaagccatggctgaagatgttcaaccttggttgactgacgtccgtgattatggcctgttgaaggaagttgagaatttaacccaaaaccttatccaagcttctgatgatttgaggttaattgcctaaacttctatggctcttgtctatcaccaatttggcttgcatgcatcattatattcagattgccatgtactcatgtagcacattgacattacccattagtgtaggggatgccaactaacatagtaacattttaaattctgattgagggagacttgatgggataatggcaaaaaaatgatgtcgtaacttgtttcttgtgttgcagttgcacaccctataaattgaaattgatcataaagtcctcttattttactctagtaaataagaaaagcattcacctattatgtttatccagaatgtctgcttttgcccattaggactagacagaattggactgattccaaaattccttgtactctttaattttacactcagaacattcttaagtataatgactaacagaaatcaccctttgtgtacgcagaagggtacattcatccatcatgacccctgagaacactgaactgtttcagaagtccataaacacaattagttttaccttgaagaacattgaggtatgagcctaatgtggcaaaataactaaatctaattattatgaatagtatttccccatctaattatttgatttttggctgtatcactgcagaatattagcaaggatattgtgggttttactggggacgagactacaaaaaggaatttgaaattacttttacagaatctcagcaggcatttgtgaagtccaatataaagataggaagtagaaaatgacaggtaatagtattgtaaacaatgtttacatcagctgcaaagcagtgcaggcgtgttattgactgatggaattaatttctttgtggatgacctttattcccctgataaagttatctatctactcatctgtgttggatggactggtttttaatggttgacactaggacttcagaaagaaaaaaaagttactggtcacaggctcataacattcaaagtgtaatactataggaggttatgaactactttttgtttgtttttctttcccgcactttggttctaatataaactggcaaatgaaaatgacaattgtgatttccaacactataattcatgtcctcgtttgttaccttaaagttagtttacatgcttatttggtgtgattgttactcatgctactactctttgtccaaacgtcttttaacccatgttatttacatatataatgtacaattgctccttgtttttagcattgacaaaattaattttgaataaaattaattttaaaataatataatttatatttaaatattttcattataaaattaagttaaaaataaaatttaatataaattttttgatataacacaaaattactcaaaattatttcaacttaaaatttccgaaatcaactctgaaatcttctttaatgtaaaatcaaatatatgaaaattaatctaaaatcaattttagactaagaattaattattcaacatgaaaccaaacacaacattagtacatgacatttctttgggcagtgtaatcaacatttacatttcctttttctttctttaatggacaatggagttgatgctcgatttaacttgcacatcatggttttcagtacaaatttaaatatgattttgcagtaactacactttatctaaaatcatgagccatttactcagcgcaaaccctccataacaataagattttacacttgacctgaaaacctgcccatcaacattcttacgctgatttctctgcatccctatgactttctggacttgggcttaaaaatatttgccttgtagtatctaagttcttcaatgctttctctaatgtcatccaaagctctatgtctgtttaattttgaaggtgctctcttctgatctgcacaaatgataagcctttatagtttaaaagcaggcatatctgaagttctttctcagattgattaattaataattagtcaacagctccccttggaaaacaggaaataacataatgattataattaaaaaaaaatcaagtaaaaacaaggaccaaaatcccagaagtacttatatatccattgtttctcgtctcttcgaattgtgtaaatggttaccgtgtattattacaattgggggcaaagaatatttgtaagtaaaatatcattaattatgatcaagacgtccaaaagcaaaaggggtagtggtgagattccaagcttcaaagttaaaacatcaaaagaactaacaaataatatatcaacaagcatctcctttagttaccttgccaagtttctaagcatctttacgctattacatagatatctaaagtcataggcccacagcagcatagaatgtatatttgttcataagttgaattgtttttgaggagacgggtagcatgtccataatcttgtgtaagttttaaaacatcacttttttggtaactttccaattttcaccttctcaactgtattttgcccttgggatgttgagccaaggtcagaaatacaaaagagggggtagtcatgttaaaacctctgatccatgtgttaaagttgccctactaatatggcttgcagaaaatgtagggaaacaaaactaggaagtcaatcagaattttgacacaaaaggacagctgacagaaagaattctttatattttggtttaaaaaagggccatattaaattattaattcataaatcataaccactggaaattgaaaactttctgatagaaatgagatgttttatcatattacttaccagttcaaccaaatggagctaacctatattgcatcaatagcaccaaaaaaactagaagaatcatgtttacataacagatccagtaaaaacaatgcagtgataggcactggaactgaccaccaatctcaagcacaaaacaattccttctttttatgggggtgaagatggttatgggacagagattaaggccttaagggatcaagaagtgattgatagttcataacaaatattaaacttcagtatgatttaatgcactaataccaaagaaaatttaattatatactaattgtataatttctcacctttgggataccagcgaatgcagagagctttaacactactaacatcaacaagtacatgagagaagagacttgccaattttggcatatatttctgcaaaaattgatctagttaagacagaaccagaacatttcaaacaggaacaataggaaatatagcggtaccaaataaaaatagcagtatatgttttaacaaggcttgatcaggatatgcagaatggaaggggaactggtctaaaaaaatagagattctatattcagatgacataaattttcatcagtgtctcaagtctcaacctgatcttttaccagatgtccaacttcataaatgttatgatgtgttgaccaacataattaccatcacttggcaagcatgaaatataaacaatacccaatattgttgtattgaaatatgatgttatttataaaaaaaaaaaaattgattatgcgatgcgaccaataattttcagcagaaattaacaaaagaatccgagacttgaggaatacatctgttctataaagacaaacaacattatgataattagaatttataaattaatgatgcttcagcagagccactttctacaagttactatggcagaaccaataccttcagaaattgaaaatcaacatatattgaatttcctgccaagagaggtgtgtacgaaccaacattaacatatctcttaacaaattcaataacctgcaattttgcaagacattacagattttcattataaaagagaataaatgaatagaacaaagaaagggaaagagactcggtcattgcattccagtaaagaccaaaagtagtacgtcaatagttctgaaattacagcgaagtatataagtgaatatattctgaaatctgaattatatatataaacttcacagacataatcctccaaaaaaaatatgacataaatatcaaacataaaagtataaaacagaggtacaaaaacaaaaattaacgttgagaaaataaaccagtgttaatactaaaaaaaaaaaaggaaaaaaatttgctgataaaataaaaatataatattaaactaaccagtgttgctcaacaaagttgaatgctttggaagaggaggagatgagagtttttgaaagtatgggacgattaggattgaggatgaattttgaaaatattgggtgataaggatttatataagacgtttggattctcctagtagtattctcattacttaaatagacgtttggatttttttgcttaaaataaggtaaacttttacttttactgttttatctcttttaaaatcatagagatttaaattttttacggttttacctcttaaaagttactgttacttaaacttctacctctcttaaatgttaaaataaaagagatttcaggaataaaatagtcattacatcttcctcgatgtattacgtattctcagattcctgtggcggcgcttttcagccgcaactcagtcgcgataacgaccgctactggcgctaccctcagtctcactgtctcgatgcggtctgcggcggccggtcgtcgcactgcaccgctactcctggaaagcgtgcaatagcgccgctattaataagtatgattggaagtatgggtttcataaggccttaggtccttcaactacaataactagtttggggtgtggttctaaaagactagacacgtcactacattgatatcacaacataagaaaccatttgtgctacattaaacaccagcctagaagaagggaaacagcagcgatctgctgataactgtatagccttataagttataactacttaaatatattatataagttacacaatgaccagatcactctttaagtaaaatttaaaatgcatttatttcaactgttcatgccagtaacatgaatctttagagaaaagagaacaggttttctggtagggaaatttttttttctcagctgccaaaaactttcctgacatataatgtgccacacaaatactttttatgaaatttgtgatggataatgagaaattcaatttccttccatatactaagattctgcaatccctaatagacaagtttaactatttcatatgcctataaaaaggataacatttttttcaagttcattgtatatagaaaatacagtacccatttaacatgatagttgatagaaagtaagctcctatgaaaagagagcttgccacatgccacatggtatatttactacaaacctgcttctcagcttctccttcacttattgtactttttagcaccttcattgttaaccctaaatttattgaaaaattgttagtcaatgccatttaaaatccaattcaaaaggaaataaaagtgaactaaataatgttaaggaaaaacaaccaatcagcaactcatgaataatatagtctcaaatttcttcatattctataatttattaaattagtttatctattttgaaggatatcttacactccccatggccatctctctaataaaatgtttttttctcttaacaaaaattaaagtatcaaaatacaacatttaccacttaccactagctgcatgatgactttgacaccattctcccatcctgtcaaggcactccttagtttgatggatgaccaaatcaggaccctaaaaatagcagatactttctttcatacacactcttacgtgatcgtacgtactagattacctatttacttttaagcggagtgctaggtacacactctcatatagattacaatttattgaaaactgcaaaactaggggagattcattaaataaggtgaaggacccatcaaattttttgatttcaaataaaattcaacctatgagaaagagtgtattcctagcatttctcttgtaatagatacacaagatttgagcaaatgtgatcaacatttcatcctttgccaagaaagagtaagagaaaagaaaaacgattttttttttttttttggcagagatagtgtcaaggaattttgttaacataaaatagatctaatagcattttccctcctttttcagtaaaaaggttgggggctaagatcataagttaaaatttgatcaaattcatacttaattcaaatttgtattaaaaacacattacatagcaaaataaaaatgaaaagtcaacaaggcacccaatgaatgttgatgtttacactaaacaaaagaaaacaaaggagagcaaaagtgcatatccaaaaacaataaaagcaaagggaagctaacgattatttaatgctctaaactctattaatacacatttggtttaacttattttgaagaaatcatctttcatttttcaccaactccttggaagagaatttggagagagaaaatgaattatttccgttgaaaagagttataccaaacatgtgcttagtatgatatgcagataggaaaaaactctaaataatttcccgcttacaagcatcaaaatgtcgagtaagacgggttctagtctatggaataagcaagttttttccatataaaaaacagagaggggaaaaaagtaagaaagaggaatgttattagctagagacgggagaatgtagaatctcatttaaaatatagtgaagcatggaaacgaccaagtcgaaaacaaaaaatgagcatggaaattataacattgaattaaatacctccactgttttggctaaatttccatctgtaattatacaagcaatctccaatattctgtccacttcaatatttaaacctgcacacacagagaaggttcaacattcatcatcatcaggcactaaacaattcaaatgttatccaagaactgacagtaacacagtttgcgactaaagaatatatagcctacttggtgagcaccacaaaatagtaaatacaacaataatagataatcaaatgtaagattctaattatgtcaacaaggagaaaattgcataacacagaagttgtgcaattagaggcaggattagaaatgcattctaccggataaaatttacaaaatggagaaatgataactagcagtgaaattttataagcaaaatcaggagggtgcatgcagatgatgaactccaaataacattcagatcataggctgacagtccttcaagcaaaaaaagacatgcctttagcaggtcaagaactaaagttgataagcccaacaatagcaaaggtttcaagaaagcatttaaaagcataaaatagagagagggactgctaatctataacacggttttttaagaaaataatcctcggaaggatagaatactaaacaataattcaccttggcgagcacatgtttccaaaacataaagtttatccaaattgctaggaagaaggctcagttgagttactataattctaccttagatgtagagccatgttaacacaagtattggtacaatatcaaaaaatgtaagagctttgttgctgaaagatttagagattcgagaacaagacaaaccaaacacagagaaaaacataatgaaaaatatttatctaaatagaaacaagcaaaacacactccaaacaacccattctacaagcttaccagtcatttccaagtcaatccacacaagaggcaacttgtattcacatgaaggagtcactggattttcttgattttgtttcttgctttttaccggtacaatgtcaatgtcggcattaaccctcttgtcactactacctgcgccatgaagtatcttttagctgctagttcacttcatagtaatcaacataatgttccccgtagcaaacatccatccaggatatttatgtaactagttagtacaaataaatatggagaacaacaagttgactacagaagatatcagtatgaggtgattcataagcttattttttgttaattcgggtacaagcttattttttgagtttctcaaacacaagaatcaaaacacaaaagaagaaaaattgaacacaaaaaaaaaaaaaaaaaatagaagtagtaattcagtggctgtactagagctatgaagattagattacagcagagaaaaataaccataatagtagaaagaaagaatgggagggatagaaaaatagataaaggttgtttttttattttttatgcttaaaatttgcaatgtgttttcatgttgttgcagcagaagcactcatattcaacaaggtgaagacactatcaattagaattgaatcatcgttattttcgtttatatttaaaaatttgatgttttgtcactctgtctctgtgatacactctagcattggagcagtgcactgaacgaccaacttgcaagatattaaacacacttcattcaataaaaaaataaaaataaaataaaaaattcatcagcaacaaaaatgaacaggtgtgaaaccctaacccaaagttcatcaactacgcatggaaaggtggaaactgaatgggagagagaagagggaaaagggtaccggcagtggtgagaacatggctgtcgtcggcgtcgagttctaacactgaaaatgaatttgcgagtttctccatttctctgctctgtttctttctttctctacaattttgtttcattttagattttagtttttatgcattatcagcataaaaatattacgcagttcaccaataaaatatttcaatagatattattttaaaaaaaaaaatattataaaatcaacaaattatcttacatgattaactaaccatataaaagtgtataaactagtatttactttttttttatttcctttaaaaaaacatcaaacaaagaatcaaaagcacatattattagagagttaagtaccattgtaattttgtgtagaccttactactagtgttgttggttctattgttagagaataatacattaatttggcgttatgacagctagattatgtttgaattaaggaattaagtacaccacaaaaagaaaagagaagtcctcgttggtgtttgtaagagcatataaataacatagtcctccttctatatttttccacatcacatcacatcgcaaagagagagatccatcgatcaattaatttccaatggccgatcaactcaccgacgaacagatctctgagttcaaggaagcctttagcctcttcgacaaggacggcgatggtctcttttctcagatcccttctctctctctctctctctccccctcttatcattagatctcattccaatctcgttttctttcttacccttttgattattttgttgaatttttaatcttttcctcattgggcgtcttctcctttcactttttgctccttgatgtttgtgggtgtatgtataatgtatgaatgaattggatttgcattctcgctgaaatatccaacctttttcccgttttgcccttcgctaatgttgcttgtgatgtgataatttttcctgttctaggattgtggggttggttggggtgaatgttttcaactgtgaatccagatttgatttgtgggtgtttgatttctcgatcagaaattcggaattgtttgtgtggatgtgacatttggtgctacatgtttggatttttaaataacttaatatagaatggaaaaatataaacttccacccccctttttaggtggatttaggtaggaagagatggtgataatgatatgatgggaaataaagagataggaagaaaatgggttggaaatatgaaaatgtatgtttatataattactcgtataggattgaccccctttatgtttattgactgcattttttttccatttttttgttacttttgaagatatatctgagaatgaaataagaattgcatggtatgtgaatctcttatcagaataagaaagtgggatttatgattgattattgttgagttgtgcgtggtttataatgaatggaaaggattttttacccccatagtactggatttgtgagtcttgtatcgttataatacatttatagatttatgaaattgtagacaaaagatcatattaacctggaatattatggataccactccccatgttcacattcccgtcattagtgttgatgtgtttgaagctcttgaacgaaacttgggaatatgatttgagcagaaaaccaaaattttagatctaagtgttcgtcttataacgtgtttggttgcatgttgttgatgtgtttttccaacctgaagctaactaaattgacataatattttgctttgtgatgagtttccaaacatgcacttgattgattcttaaattggatcatgcatttccttgtgaggctgaatttcttgtttgtgtttaattttttttcttttgtttccaaatgatacaggttgtattaccaccaaggaacttgggactgtgatgcggtcacttgggcagaaccctactgaggctgagctgcaggatatgataaatgaggttgatgctgatgggaatggtaccattgatttcccagaattcctcaatctcatggcacgcaagatgaaagacacagattcagaggaggagctgaaggaggctttccgcgtgtttgacaaggatcagaatggtttcatctctgcggcagagctccgccacgtaatgaccaatctcggtgagaagctgactgacgaggaagtcgacgagatgattcgtgaggctgacgttgacggtgatgggcagatcaactacgaggagtttgtcaaagtcatgatggccaagtgaggaccaatcaaccataacaataacatttgaaagcacatgaacagaaaagggacggggcagataagttttgatgaaaaatctattttcattaggacaatcttcatttggggtcattagtttttgttggtcgggtttgtgtttgcttttatttattggtattgctcattagtattttctacttgtttgctctgtcccgtgttttagtagcttggattagctgtgtctcaccatgcatttgtacttcacttttcatcttttttgggttactaccatgaaactggaacaattggttgcaattggtgcttttacatgtgggtgacttatactgttaaaaccgtctttatgctattatatgattgtttctgtgatcattttgcatttctcgacttcaatccaataatgatgaagttaataacaacatggcaacgatctagatcaagagtgttgtgtttaatttgtcaacacgcctttagcaaaataaaaagtgattttactaataattaaagaaatatgcacagccttgccaacttgtttatgatctcgttttcgataactaggataataatgtacttaaaatgcaaacatcaaactaatacacgtcccatgaacgtgcctttggaacctaaataaaaaggcataggatcaagaaaatcgaagctaaccccaaaaatgtttacttagcaattatgttaagataatgaaacattatattatttattgttacattaaatggttctacgtgggacattgatgccgcacaatccaacctgagcacgaaagattttcccttactgatggcacgagattaatttctttcagaaaatacaaatccaaatccaaatccactgcgaaagcacaagcaaagtcaaaatcactgcgccaattcttaacatgtgggtgcttttgaagatgcccaatgccagaaccaccatcgtggaggcatcaacttcttcctctttttccttgggtataaacacctatgatagatcttatggaagatgtgatgtgataaaaagagataaattaaaaaaaaaaaaaatgtatttggctgatgaatgaggcattacttttttcactttttccttgacaatatatttggttgtcaaaagacatccatttttctacattacttaaatcaatgatttaaatgtttggaggattcctccactcatgttttggatgatatttgttggggttaaatatattttcgtcctttgaaaatacattggatttgaatttaattccttaaaagaaaaaattacatttaatctccagaattttagaaatatcaaattttagtttttttaaaatcatgtttgcttcttctatagttaaatgtgaccacgtggtcatcccagtcggtggttttgaagtaatttgatatggcatgtaactgattagaaaaattaaaaacaaaattaagttaaccaattaaaaacataattacaaaaagtaaaaaagtaataaaaatagatgattggagaagataatgttcctttgacggatgtcgtcagggatctattctgagttgatgtaattggttaagatcaagatactcattgtatccactcaccacactatctcctacctcttaacatagttaaagaaaaggactaaaatctaaatttctaaaattttggaatcaaatgcaaaggaaaaaaaattcaaggagtaaaatcaaatttgttatatttttaaaggtccaaaaatagatttaaccctattttttcattttagcttttgttatagaaataaaagtgtttgaaaaataattagtgtttaggacatcagctaaaatttgataaaaagttttttcattgaaaaaataagttgttttcgttatctaaatatttgctaagaaaatacattgaaaaataattaagttgttttcatatatctaaaaatttgaatttgtgattatttctcaacaaccttttttctcttaaaaacataattcttaagttattcccaaatttcccaacaacttttgcccaataaccttgtacttttttttctaatttattatgtgaaagctgatttttatcaacaaacttatacaaataaaaaatcaattctaattataatcaattatacatgtaattgattattgaaataacttttgcatctgtatcaaacacaccctcatgagaggacctttgaataatttatcccacggaaatgactttgttaacatctgttttcgggattttgatcctcaacagtttttagagaaactggatgaatcttatgaatccattcattttattttattatgcaataaattaacatttaaaattaaattttattaactttaatgaattgatttgcaactgtataggtgtagtttattttgaaactgtagaagtctagaagatccagatccttgtttcatgtttcagatgtccaatttgtcgtgattctgttaacttggataagtgatagcatccttaaaaagaaaaggaatcttcagtacatggtattgtacatttgtactactgtattggcacagtcgtcatgttataaatagtaacatgctgtaccttatggtacggcctaacctgcttaccatactgtggcatcttcatttctgcaccctttatgtcactcacgatggttagtgtttggttcctttgatcttggtatgttggacatgaaaattttaagaattagtgttggtctaagatttcattggtttactttaatttaaaatttttatctcgtttcatcttttttcacttttacactcatttcatttctttaatttaatttaaatctttcatcttttttcacttttatactcattttattcctttaaattaaatatatccttagcattagcatggtaaacatggagcggggacaagcatgtttgttggctttgtttggtgtatgtaaaatatcatgccgactaaggtctctttaggcatgcatgcaatagctacatacttcaaatctcaaatagaacaaagcttcaatcatggatttttaaaaaagaaaagcaagtaggcagaataaagtgtgcaaactaaaggaaccaattagttaaaaggagataaatcaccaagaaaaagaaaaagaaatgataaaaatgcaagggaagagggagaaaataataaggtggatagaagaatctcaatgattttgtttcacgtaagggaggaaccatatcaatgtctcttggggtgcagtgcagattattcaaataatataaatttaacaacatgtatacattaaattaaaggacaataatattttgggtccatatttctcataattagaagaagaaaaatgaattcattcaacaaaaatgtatcgacctttttccagtctaggaggtgttgttgatcccttaacttttttttttttatatatataatcattttaattagaacttttctctctaataaaatccaaaatatcttcacaattgtgcgggatccctcagacaacacacaattctgctcttgatataaattattgtatatatataatgttactctagagatagctagatcgatagaagatatcgcatttattcatgtgtcctcctttcaatgaaaatgaaaattgatgtcttcctttgattattgaacttgtactcactacttctactatttgcatgtaatgattacgagtgtgtttgataggaagaaaaaaataggtgagaaatagaatagataaaaaagatgagataaatagaatgaatttagaggtatttgatttaagagaaataaaaaataagaaaaagagtaaaaaataattaattaaattaatttttttttatcaaactcttgcaatcaatttgctagaaagcaaaatggattttttgtttgtccactgcatgaaaatcgattgaagttcatgggtccaatgcataatcaattactattttagaatatccaaaaccagttatgtatgaaagtagattttagcaactctagggaaatgaaaatcaattttatttttgaaaattgactatttttactatatacgctaatgataatcgactaacaacaaaaaataatcaatcattttctgcaagaaatgagtactattgatcatttctgcataattttgtggggaaaaaaatgtaaatcccacaactttttatttttctccttcaatttcatagctaccaagaaaagatgacaattctctctatttcttcattttgtctcctctctttccttcttttctatggaaccaaaaaaagtgtacaagaataatgtattccgtaacaaactattttttttagaagagttcacactattattttattagttaaaatctattactacaaaattataagtgagtctcttttaaataaaaagtgaaatacaaaattttataatttttaataaactttaactaataacacaatatgatagaaagtcactactctttttagcatttatttaagtaaaaagtgagacacaattttataatttcaagtttattatttgctaacccaacacaaatgatgaaaaggaaaaacagggatcaaaagtaatcgtgcatggattaaaaaaataagtgtagaaactaatgtttgtccaatataagaaccgagcggctaatttttcttaatgaaaaatttacccccgacaatattaaaatcttgacattttactcatctatatttttatcccggtaccagtagagtgcaatgaaaaaaaaaaaaaaaaaaagatgtgcctgattattttttttaaaaaaatcaaaactcatatttaaagaataaatgtcagaaaagaagaaaacaagatttgaaaatgagacaagtttttggccttaaaaactaaaaaaaaaaaaaaaaaatagttttgaaaatatattttatcaaataatttcaaagaatagaaaacagttttcaaaaatataaaataagcaagccaaatttgtttctaaaattcaatttttcccttctctttctcactttttcttccaccgagagaaaatatattaatatccatgttatttttctctctatttactttctctatatttcctgtctttccatccaaaggtaccactattttaagctaataatttgatattttgatccaaaaaacataattatgaccagcaaccccttaccacctccagtagcttcaccataagacaccctattgatacttcaataattcaagaaggaaaagaaacaaaaggtttaatttatcaatttgaacagaagcctcaagcatatatagacacaagcccttcatataccacctgtcaaggagtattatttaaattttcatctttacagactgaggctaccaaaaagaaaaaagtaaaaaaaaaggtttatataattgacaagcctcacatatttcacctcttgagtggtttgtacaggacaactgtcacatatttggactggaacctgtgagtgagtcccagggcaacaacagactttaaggccaaatttttctctatgaagacatgatttagcacaacatgttgaggctttgaagaggaacctatgtcagagttctccatacctaggacagtaagatgcagctgcgaaggaacggccatcggctcttttgcaaagtcttcctcagctggaaatgcttggccatagctggattcgggggagggtggtgcttcaaactcggacacaccatcagggttttcaggcacataatcctgcagaaaaccataacatttaaatcattaaatgaaagacaaatcaactgaatttttctttttgtattgatagtcaagtaaagcaaaattgtgaaacaatttgctagtttttattactcaattttcattcaacagtcccactaatgcccagccctaaaagcacaaaaacctatgaaaattggctttccatgaaccaatagtagagtgcagaaaccagtgtttcccgtctatgttcatcctatatctccacatatggcatgcagagtgcagacatgacaaaacaacataggatgcattaccctttccttgtcccacccacctggctacctgtccagtaggggtgtgcaaaaaaccggatcagtaaaaaaatcaaaccgaactgattctgaatcaattaaatcggttttatatccaaatagccaaactggtttagaaaactgactcagaactggactggcttttaaaaacgttttgaaccaaactgtttttcaaccaattttaaactggttctaagaaccaaacgaatttcaaactgggtttttcaaataaaaggaattgattccggtgaaaaccagttcggttaaccggacaggttttgtataaacattccggttaaccaaactggttttgtaaaaccgtgcatttattttttgttcaaaccagtttggataaaaaccaattcagtttcagttcagttgcaatccagttcgatccgaaccggtttttttgcacacccctacctgtcctcatcctcctcaccacaaatacaacataaaacaaagacctagaagagggagaggggggaagatcttcggcatctgttgtatgtcaagttcatcttaaaacccaactgaagcattcacattgacacagaagaaaaagatttcaatgcagacacacaattaaatatacaggagaacaaatttcatgatgaaaatatgttcacaaaatgatgttgttttcataaagagaaagaaacaaataggtcgatgcatacattaacatcaagaagattgcagacatgccccatctcatcagctacattaggaagctctggaataaatctctcttcaccatcaacaatgaacctgtaatgatatatacctggtggaaggactataaggattgagtgatccttgccacctcgctgtaatgccttcctgcaagtaataaaatttactggtactaatctcattgtagatcatttgcagttatgataacttatgtcaaatacaatccagcactattgttaccaaaaaaggagtcgttaaatctcacctagatgtccagttatcccaagatccctccacagccacattgttaccaccatagttccatgtaatcatgacagggatcccttgctcaggaagttgattaacaataccgtgagactcattctgccacatttgattgagaaaaggagggccattacctctttgtaatggagctagaggaacctgaaaaacacaaggaaattctacatttattttgaagtaatgcaaaattgccactggtgagatttacatgtttcctaacccagaaaaaaaaattcctaactagaaagaaattgaaatttcagtgagccccacacacacacacacacataaagaaagaaagcttcatatgtattgcagatcataaaagatgtataagaatatatttaccatttccatgggagaaagctaagtcaacaagaacagagtgctccagttataaccaaaaaactacactttccagatagagaaattttaattcacaaaactatacatttctgtcaagtgtcaacctcttcaattcattagcaaaaatcactcaaggaaaagaaaatttacaatagaaagtataagtataatcatgcaacttaagttgatccatcaacaagtatatcatgatttttcacacaatgcattttcagatcaaactctattaaatattaatatcaaaaaaatatctagcaacatgttatttaatggcacataataatattctctcttccaaatttatattcaaagacaggcaaatttaaggttttgttacttttttttcacaaaaaggaaaaaaacaaagtggagggaggttgttttgattattaatgcacatgtatgtcactagcccttcgtttacaaccttgagaacagctctaacatatttattagcctagtcaccaatcctagatagaggggcggagcggcataccacaaaaccactattacaagattgactactatgtttattagtaacaataactatttactaaaacaggaatgtcctctaattttcctgatttataggaaaatataatcaaagtttcattggagttgttagcaagggcatgtagctatggtgcaaaggtgccaccaaatagctatggacagtaattcatacaaaataaacttaagcatgtcttgtcttttaagttttgctggacatggaaatatatcaactctacacaagagagagagagagaggtgcctatagaatataactttttcaccaggttctccacaaatcaaagacaaaaaaaggacattcagaacattaataggcataaaagagacattgggcaaatatttaccaaattcaagggatcgatataacattgggtaggagggaatagaggcacagaaaaatattgaatgtacattgtatgccaagcttgtagtcttgtgtagcacttttgaaagtacaccctcaaggcctcaacagctattagaccataaccacaaaatatcttgtctgtaaaattcctttaagttacatagtgatgcattaataacaatattcaaaattattgcatcactattagcaggcagtatcatctatccgtattgcaatatttcacgtgttgtttctcaaatggagaaatgtcgaggaatgtgagtaacagaggacaggcatcacaaaaattgacataaaacaaaattataccattaaacaaataaaactgattccatgatataagtgatataactggtcacgttccaaacagcacattcacaagctcaatccagaggacattattgcatgcaatttccaaatcagacaaaattaacaagttaatactggtagactagaactacgaatgagtatttccaaatggcgtaactatctggtcacaaccatccacaatatgtgagtttaaccggaaaaagaattatgtgggatggcttaaacttagatggagtcgtgtgtagtagttgtgtgagctgtgaagctgagactcacataagtataaatctaataaaatgttttcaaactgtcactgcacaaaaggaggggtaactctcctaaaacagacagatataagtacacatcaataacagtttcaaaaagaacaagcaggtgtagcagtaatctccgagatccaccccctctgccctccatgccctccccaaacgagttttcaaaattcaaaccatatgcattcgatcaaaaccagccacattcctgttggtcactgtcatgcttattgcgtgtttgaaagcatatttctgcttcagtaaagaagctgtgaattatagcttccacgttattctacaatttttgttggatatggctcatctttcgcagtcagatgacaacccttcttgttggcggggtcagcagaaagccaactggggtccggggggcagcgccccctggcccgtagaggctaggtactgttgtgggcctctgattattagtaatattttacttttattagtagtttgggctagggcccatgaatagctgctgttaggttttcttttaaccctatttatattccccttgtaaactgagtgacttgtaacgagtggcggtgaggtgattatagtacagacaagctggacgtagcctacattgggtgaaccagggtaaattactgtgttatatctctcttccctattctctttgctgtttttcgatttgtgtgtgattgtcgatttccaacaattttgacgtaaatttttacatccacaacatgtatccaaacacaatgttattcaatctgaaccacgttcatgatgatccatgcaagaaaggacgaatccatcaacaacataattaccagatccgttcaacaacacatttagtttcaactccgatggcgataaaaaataaactcagtaaataatccacggtttcaacaaaaaaagtaaccctacctacactgcctcctaatctctcgctctctgtctatcatgcaccagacaaatgttagcaccatactcaccaaccgaacacagaaagcaaaatcaacgaatagcctagttgaccgaacaaaaccaaaattccaccctagctagtaaaattaaattcagcagaaacgaataagcgtgaagacgaaataaaatgcagaaaaatcgaagaggaagcaagagccaaagaggatgttgtggagagaacctgaggaccgaagaggatcggcgatctggagcggcgagggctctgcggcgggctattggccattgaatcggaggagaaggcgcgaaccggagggcgcgagtctggcgcgtgagttccacgtacggcgggttcggcgacggagggatcggcggcgccgggaatggatccatcttctctgccgttagtgtttcccatgcgaaaagctatttgcggaagcaatcgacggaggagaaaggaaaaccgaaacggtgcgcggcggcgacgtcgtcgtgttgtgtgtgtgtgtgtgtgtgtgagagagagagagagagagagagagagaaagagagcaatgcaatgcacgctcgcgagggagaagagaaacgacggaaggagaaatgatatagggagtgagagtagggaagaagaaggagaagaaaaaaaaaactggtggcgttgttgtttgttcttatcaacttctcctgtctgactctgatctgacgctgtgttctgtttggagtttggacttaggagagcgagaaattaaaattataaatttcagaaaaaggaaaaatgagaggaaaatataagccttttaatttatttatcttttccactctcgcctcgtcgcgtgtttttccacgctctctctgcaacggaagtacggaaatctcgcttaccctgtttcttacctatttttacctgcttcgcattcaattttcatttgatttcttttattttgtaattaaattattttaataaaatttcataatggttacttactactatttatatgaacctatgtatcgaaaaaaaagaaaacatcatgtattcaatgggatgtgactcattgattcttacaaaatattttaaaaaaaaataaaaatttaagtattattaagtctcaaaactaaaaattatcaaaaaataaaaatctcaagttaaatcaaattaattttaaagataaaactctaatataatcattttaatttcctttatatttaattcaactcaatctataaaatacatagttttaatcatcattttaatttttcagaataagtatgaaaataaataataataataataatatacatcataaatatatttaaaatattaaatattaaatttaaaagtcattatattattattaataatataacacttggcgtatataccgataaaaataaatttacacgacctaataattttatttatacatctttactcaaatatttgtaaataaattataagtatctatattttaataaataaatataagttatataataattttcaaaaatttaataaatatatatgagtgatttattattttgcaaatatatgacagtttgtaatttgtaattaaatgatcatgtaaaaatatttttaattatccctctacaaccaatttacttaaaaaatataatagtacaaaaaaaagtaatgataattagtgagtcggaaagtcaaaatccatgccgtaaataattttaatcacctgtaacaaaattcgcaagtttgaataataagatacaacgaaaataataatatggattgttgaagtgggcttacagtttagaaatttatttatgagaatgtcatgcttattatatgttttaaaaaacattaaatatttcatgttaaaaaataataaaccatattttattttatttttcttataacgagacgtagaaaagtaacgaattataatattttttatgaaaacatgagaaatttatttttaattcaagtacaacttttatttctaatattatttttaactttaaaaactatttttaaatatactaaaatgtatttttgaacttattcaaaaatagcatttctaattatagtatttttgacaatatcattcctgaaaatgcagttattttatctaaaggagacgtttaattaaaggaaattttttccaatggaaataatgagtcctaaaaataattatttctagcaatgactaaaatctactttgttgaacataaaaaattattgagaatatttataaatttcttgaaaatcaaataataatataatattgaccgaaaactttcattatttatcactttaaatgattcaataatgtgatattattattgtagtaacaaaacaaagtcggtatttcacctctctcatgagaacaattttgtgagaaatcatttaaaaaacatttatggaaatattattctttgtgtaaatgttacttaaaaaaacaaatattaaaaacaagcatactaactttaagttttcaagaaaataaatatttctcttgtaccttaagatcaaaacaaatcttaccaaagaattttaatgtggctaagcagaattgtgtcatatttgagtgaggttttttttataaaaaaaaaaaaaaaaaaacttaaaactcgagccattcttgatataataagttcaatcttcacgcatggttgttaactagataacattatcaattattgttagaatcacaagtggggtttcttttaataaattttttatttgcagttttatcatcaatttttaaaatggttagtcgacaaaatgttagatttgtatgaaaaatagcttacgatgtgaattttaaatcgcagaacgtaagattatgtgttccaataaagatgtacattcaatatccctctcatgtgaaggaatattatttcctctggtctcagatagtgttttgattggagtgggaaaaaaagaggaggaaagggaagaagaaggaggtttttaaatttttgttgtttgattcaatattttgttgactttaaaatagaattattttaaaataatttaaacaataatttaatgacaattttatactatcactttatatatattaaactatttttctcttcatctagtacatacaaatagaagtgaaaaggtttaatgactgggtttgtaccatatttttctttcattttatactctctatttattctttaattccttatcttttttcatttctcaaactctaaactgagaaaatccaatgtggttagttaaaaatagtgtgtaaattattataaattattgatatctgtgttggatttccacaaataaataataataaaaaaatctccagactcagaagactccgaggtgaagaagagcgtgcagattcattcaatcaacaagtgagaggtgattccaaatcgatcaccatcacatatttggacaattttagttttgcaattaaatagactcttatgctaaaattgactccttaccaaattgctttattaaatacacatatgccctgagaaaaaagtttccacattcattttaatcacaagcaccagattcagcggtatgaagacagatttctaagacgctttaacctaatttgtctgtatttcaaaggatcgattggaacacgaaggtgtgcatgatcaagaacacgcgcaacagtaaaagagaatgagtcgattgctttgtattctcaatttattgattttgatatcgacctatcctttatattaaagaaaaacatttacccattttagacgcacttttacctgtccctttctctctctcttttttttctttcgtgtccgatgaaaaattagaaattactatattttaaaaattgaaaaataaatatagttatatttttttatcttaattttcaagttcattagaagaaaaacaaactttgactaaatattttacgcaaaaacactgttaaatccaataaagtaaataatgatttggacttaatattttacgcaaaaacattgaaatatgaatgatacaaccttccaggaagatgcaccagaacagagccatattctacaattattccacgatcatattcaattggtggaccagccagcaccattcccaacattagcaattgacttgattggcttctaaccagcatttggagcattaacaatagttcaataccagcctcgttgttgaatcattattggttatgtcaaaattagcttttctcatattgaccaacagaatttgaagtatttgggtatcaatttgatataaattataagtgttttgaagaatttttttattagaaatatattatttttttagtaaaaaaaatttaaaaatatttctaatcttatatctaaacaagttctgtataagaaattattatgtgattggaaatcatcctgtgtttggtccgcatcaaaaatgctcaggttaacttaaaaaatcatctaaattggggagaaatgacgcaatagctaaagtgcgtgcttgaattagatatatggcacgtttatacagaagcagctgaatgtagcttttgtgtcattttttgtgcttaaattagcgaatttgacaatatctgagttaaattataatatttccacgcaattttcattctcgaactttctcaataacatattcacgccaagctaactaatcctaaatatatttattggtaaaatatcccaaatatatttgttattttttgaggaagaaaatatgaacgataagttaacatttttatcagtattttttttacgtggatttcacttatagaatcaggtttaaattatttatggagattcatgtgaaattttatatagtgataaaaatagcaaaaggaatgtttctctaatttttttttttaaaaaaagtaaaataaaattggcgcaagagcaagggaagaagatgcacagcagtgggcgcgtggagtagcgtgctgaggagagaggtgtcgtacgtggcaacgaggacacacgtgtaagggggcctctcgtttggttttgtccaaagggctatgattgtcacgtgacgtacaagggattcggataagattctctctcttctctctcattgtgaaataaaaaataaaaataaaaaggaaaagcaatgctccccaattaccaaactccactttctaaattagaactcgtatggataatcttattaaagacaagcagagtttctctcttatggaaaaaagctatttcgcattcgattattattatgttcaggtatgatacttggtaacagagaacgttgaacaactttacatagaccaagaacatgtctggtgagaaataacagataactattttatacatttttaagcaatattatttagcttttcttcttctcatgggatatataacatgtagttggttaacaacatttatattataaatcacatatgtttcaagcacggaatgatttacaaaattaagtaaaatactcactttaacaattttaatatagaagtatttttttgttaaaatgtttaaatttatatgagactgtaagatccacaaaataaaatagataatttatctaattgtgtattatagatgttctaaggtatttatataaaataactaatatatataataaattgatgatgatataaaaattcttacattactatttaatcatacatgtatcctcaattttagactgaaaagtgaggtataaatttatgggtgaataaatgaacatattcaaatggaaaaggaacaagttttgtcgggcatcccaaaaggatctagcaaaccaaaatataatgatcgaggaacacatgtatttacttatcaatcaacttgtttaagaaatataatgatgtctttagttacttgaaatgttgtttttcgtaaagagcaagcgttgtatgcaaaattgaataaagcatatgacaaatccttacaatgtgaagggtcgtttattatgagaagggacaattctgatacttgtagcgagattagtatcattatgatgtaagaatattctttatttgtttctttggtgtttattggtggatgggattacgttattactcttcatataagcatttgatgatgtgagtaaccagtcacaattaacaagtctttagtttaagttaaatttaatttaattcattgtatttaaattggatcatacttttttttaaaaataaatcaggtcaaagcttgtaataaagtttatttaattaaacagattagattatatgtcttttaaaaagtcttttaagcaaaatagatcaacttattaaaaaattcataagtacacattcattgttaatattattattattatattaaatttgttataatatattaaaatcttatatatttttttgccttttttaaaatgttaatcatgttaatttatttaaagagtcaagtaaaacttataattaagtttattgaaagataaagtcatgtcttatttatatattcaaaaaattgtttcaaattatattttaaataagttatcatgaatgttattttaaaacttaaaaatatatttatatcatataaataagttaattttgattattataaaaacacaatatacatatttttatcttcatatcagtgttaaattatcacaatttcaacccttaaacaagttacatgcatacgagacttttttaagttatttaaaaaacacctttgataagtaaacatatataaatatgcattagtgcaacaaaacataatttataatagtttaaaatataatttttatactttcaaaataaaaaataaaggatattttgattttaaaaaataaacatcattcatataaaagctgcacatattaaatttaatataaataactaagtgactctttaaataaaaaaacccacaattataagaaaaaacaccaaaatgaatttatcctattttagataatagtatgacaaatgaatataaatataaattaacacaatataaatagaagatataatagttttaaaaatataatttttatactttcaaaataaacaagggaatgatattttgatataagagaaaatttaacatcattcacatgaagttatatacattaaacctaaatataaatatctaagagtcttttaatattaaaaaaacaatggttataaaaaaaatattaaccgttccaataaattttctcttatataattactcgtggatagaatgatatgaatatagattaatgcaagataaatagaatatatgatagtttaaaaatataatttatatctttaaattaaaaaaataaaatattttgatataaaaaaatttaacatcgttcatataaatgttgtataaattaaattaaatataaatatccaagagtctattaacataaaaaatattaatggtttcaatggatttcccctaataaaaaatataaatacaaaaataaaatggtgtaatggttattaatttataataattggaaatacaaataagaaaaattagtataacatataatccaataagcaaagctgttgtaaatgttaatcaaagatggtattttgtctaatctaaaaaaaatgtgaggaagtattaatgtaatttgctaaataaaaagaaaaagaaaaactcgcaaattgcaacatattacatgttggagaagtggagatccggcccggcccggtccatttacactgactgagaaataaccgaaatagaccactacttcacatcccaccgagagcacaatcgtatctcgctttcttctttcttccggcaaatcaaattaaaataaaaacacccccaattcccgaaaccctaaccctacctcctcgccgccatggctaagaaacgaaagcttcgatcctccgaccccgaacccaccaaacctgtcgagctacagcaacaggaccaagagccagttgaactcgaccaacaacaacaacccaaccccgaaccaaccctagaagatcccaacaggatggccgtcgacgaaccaaaacaggaagaagaagaagaaccgcaaaacgccgaaagcgaagaagaggaagaggaagaggaagaggaagcagaggaacaacaagaggagcggcaaccagaaaccctagaagagcaacaggatccagaaaccctagcggctgcaaaccacgcggaaacgaatggcggcaatgaaggaaacaacgaagaagaggaagaggaggatctcactctagaagaagagcccgtggagaagcttctggaaccgttcacaaaggagcagctccactctctcgtcacgcaggccgtggatatgttccccgaattcgtcgatagcgtgcgccggattgctgacgtggaccccgcgcacaggaaaatcttcgtccacggccttggctgggacgccaccgccgatactctaaccgccgtgttcgggaaatacggcgagatcgaggactgcaaggccgtcaccgacaaggtctccggcaaatcaaagggttacgcttttatcctattcaagcacagggatgatgctcgcaaggcgctgaaacaccctcaaaagaagatcggaaaccgcaccacttcgtgccagctggcctctgccggccccgttccggcaccaccgccgaatgttaccccggtgtctgagtacacccagaggaagatttttgtgagcaatgtgaatcctgagattgatcctcagaagctgcttgaattctttaagcagtttggggaggttgaggatggtcctcttggtttggataagaacactgggaaacctaagggttttgcgctttttgtgtataagtctgtggagagtgctaagaaggctttggaagagcctcataagaactatgaggggcatactttgtattgtcagaaggctgttgatggtcctaaggggagcaaggggtatcatcagcagcagcattctcattctcatcatcaccaccaccatcatcagcctcattatcagaggaaggagaagaacaagtattcctctggcggtggtggaccatcgcttggaagtggtcatttgatggcgccctcgggctctgctgtggggggtttcaaccctggtgtgccggcacaggggttgaatccagcacttggacaggcgttgactgcgttgattaaccagggagctggattggggcttgggaatctgcttggagggcttggcggtgccccggttaaccaggcgggaccgcctgctccgtatgcaaatcagcctgctatggggtatgggaaccagccagcaatgcaacccggataccagaatcctcaaatgggacagagcagtggtgtgagacctcatcctggtgctggtgctccttacatgggtcattaggtgagtggctcgtgaatttttgtttgttgttaatccataggctgccctatctttgaatgccccttgttggtaaataatgaattacacgaagatgtgtactaaaacgagtattaaaattagctaaccaattgcatgattcagtcaggcttctttcactcatggatgagcccaagtggcatacttattgtgtttggttgcattggacctgatgaaattatgctttccatattttgttttgcagttataatgttaatgtctattttggtaatctgtttctcacatgtgtgcctttcttgttttataaagatagtgatgctactatatgatgactgctcagtcttagctgttttagctacagttatgaataactatttgttgtgttttctctgagatctatttccatcaagtttcttgatctattcacagtctttgtgttaacattcctaggcttgtatttaacacttctaccacttgctgtcaatattgattttgtattgcataaacaattaccttgactgggattgtagttcaaatttgaacattattataactcttgaaaaatctattttgcagtaccgaggtatggccttgtaagagttcatatttgcatttgtgtttcttctataggcacttggttttgtgaaattagtttttttactctatgtattcactgtgcagataccctcataagatgcatcaatcatttagttttggactccgctgattcttctgaagtaccaggcactattcaaatgcatcttttaatctgtaattttagttactatttgattactaaagaaccagattctgaaacttgtatttttccccccttatcttagtagacttcccccctgacatgtttttaaaatcttgttatacctcggagtcctttatggactattgaggaacgggtgaattttggggaagagaaaactttatgataataattttttaagtgtgttgtggaccattatttttccttatgaacgtccaattctgttttatttagctttccaaagcataactgactcgagtataatttacatgttttacgtgtgtctggcattcagccttgatttttgagggctactaccatcttttttttaagtataatgttcttatccaaaaatgggaatatactttggggatttgaggactactgttgtagtcattttttatgattataggtaatgactactatttacttattaattccgtgtaacatttgaatatcaattatttcttctggatcccttttgcgaaccatttttccttccattgaattttttggctgggagattgaaagtgaaatgaagtatgacgaggaacaacattaaacaaggtttatcttttgtcataaatgtctttccatcatcctttcactcttgtcccctctatattcaaggatcttgttagagaaaatcattttttctttctccttcctgaatgaaaaagattgaacagttattgaaatgaattgttacctgactttggtcatctttttactccgttctgaaaataagcactctcagttctttgggtgtaagttagcttgttttcctagtttctacatgttttttttttaattagtggagatgttatgtttaactttgttggcaacttatctagacacataggtctttgctaccaaacaagcatgaatatgttcataacttctgtcatctgcatccactgatggagcttgggtctttccattcacttctaaggcaaagaaatgtccacacttggtgggagggttggctctcactatatacaagtgtaccctggtttggagtgaatgtcagagagaagatcagatgggtgcgatggtgttacatctttgcagttatccatgggtatgatcttttcttttgttattgtctgggaaagttaatcttcggaaacttgcttacttttcactttctgaagcttttaactaatttctgaagatattttaattctaatatattaacaagttgggtctggatttcgcttgggagttcaatttgtttttttttttttttttttacatacaatctttcttggagaaacttaacataccaaaataagttgctttgccaaaaatgtttttgaaaatcttgtcctagacagttatcttttttaagggcttatgaaggcaataccaaactgggcaaaagctgtagtctaagaaagtgtaatgttttcttcatgtttttatttgcgtgagactgaaaattgcataatttactcacaaggactaatttttttgatggctatttaacattctggatgttataatgaagatcatactgatattgatcacacagcttgagaaggcagttggcacatgcgtgaactgcaaatctggctctcaaacatcaagatattatatattggcttgaggatatggtgattaagaagattactgataatattccaaaagaatacttaactttgtcttgttacatttttgttggagcttcaataaatttgagctggttgatcttgggcgaggtgttacattgatttagaaattttaggtttcttccaacacttgacccccgaaacttttagtggaagaacctgtagttaaacaattacccccgtttttttgtttatgtgctttgtttgtgttataaaaacttgtcaacgaaattggaaaagggtaacgggggtttaaattcaattttctctatgctaagatttgcctttctcacgacggatttacggtgctgagtttacgtggaccatataattagacagaaactagtaaataacccgtgcgtacgcacgggtgcgttccgttccgctatgtttcgctatatttttataaattaattataatatttattataaataagaatatttttatttatgttattattaataaaatagtttaaattagttttcttataacaaagaatcacatcatgttccgcttcaaaagaaaatcatcaaaaactaaattatcatgtgatttatataaaaaattattgtattatttacaaaaaaaaaagctaaaatcttgggttaatctggataatccacctatgattggttagtaattgaacatataatatgacagttaattgtttgtggaagattttttgtcctggtaattgaatcattcttggatcaaactgatgttttctttgtaagaattttatctattcagcaccaaaatggtttgtccaatcttcctgtgtgttgtggttggaaagatattgcttgaccttgattacagcatctctacaaaatgccaaaatttcccttatgcagctgttaaggacctggaattaggagtaatgccaccttctttaccaatattagtagcatcatgtctataattgtttttaatcacagcatgtaagataaacatgaacatctcaatttatgactattgataataatgatttttccttttagtaagaaaatcatagaaataagatggttttgctggtgttttttctcctcaagttcaaatgtctctgtctttttataccctagaatttggaggagatgggtatataaatttgaaggagaaccaccattgcaaatgaaaatggtctaatagcagaagaacatatttatgaacaccaataatgatagtaatcaaaaggaaaaattgaaacaacttagcacattaatggcagtgatacatgataaaataagcacagcacaatagagcttgccttaaattaagttaattattccaaagcaaaagtccaactattgtcctcctctaaaaacacatttagaggtcacataaggagatttcagcttgctattgctaagtaaaataacagcaagtgaagtgatagatgataagagaagcacaacacaccagagtccaataaaattaatttaattattccatagcagaagaccaaaattgaaacaacttacaaattgaacttaaagatcataaagacagcttagtaaaagtgattgagaatatagtccatttcttaataccttgtctttctttcctactttgcccctctttgttgcaactgttgtcccaaagatgagcattatatctttcagtccaccggtgcctaatatagaaacaccctttagaaataaagagaaaaatcaagagtgagtacataggcaaagttctggctctaatacacaaacagcatttcttgatacatggttctgtctataatgcaaacctcagataatgatattgtgcaagattacaaagtactacatgtaagcaaaaatgaaatgacaatagagattgctaaaataaaaatgtaatgtggttcatgtcatccatagaaataacaaaacttaaattaaaagattgacagagcaaaaatgttaaacattttaccacttacatgatgaatatatatgaaaaagtcttgactttccaatgtcgaaggagattttttgatggctctgctactatcataagaaagtcaaacccatgtcacaaagggaacctaatctgcaaaaaaagtaccgataatatattattataatctatgtatggtaggaagtttcaagaattttttcacttttcattgctagcatgtttgaaaacatacaaagttcaatgttcattcatcttggtttgattcaaaattttcatttgcaacttctaagctagttatgcggcaaaaaaacaattttggcatcacacttgtttgattaatgatcattgaattgatcaataaggaaaattgttgggtaaaattttggcatcttggtaggttgctgcaagatctaaacattgaattctacaaattatgctaagatctaaacatttgttatagacaaatattaggttacatgacaaattactactaaaccaatcagcacctcaatacattagtctactcatgcaggaattcacaaaactaatctatcaataattgaaaagccaataatccatgacatggttccttttgtcgttctcaccaatttcaagtcaaacatacaacaaagatttacacctcaaaattcatccacttttggtgttatttaaaacaatcgtattgtcaccagaatccttaaattagtaattagtaataataaaatgtgtgaagctgactttaatagaatgaaaataacagaacagtgatataaccaaagataaggaatttgagataaatatagtcaagtgtaacctgcagagataaatttattagaaaataaaacaaaattgtcttagaagaaaaaacacaattcagaaaaaaatgtgcttcagtccttagaagaaaaagtataagtacatataaaaaaaatataaacaattaaacatattctaaaaattaaaaaaaaccatgtctgttttgattcgtattacgatcaacagcttttagaagttttaaaattccaattttatcaactaactgaggacagctgtcaacaaattaaatgaggggaaatatgaaaatttcagggcctaaagatattttaaatagataatagatatttagatgaagagaaataaatgaaggaacctagagaagataaggtaaatgaaagtagaagctttttgcttgggtcaacacacaaagctataatggttaagagttaagaaattgtttgtgttttgattgcatttgttattatcattttagactaatgaagtttcaaattttttctctcttcttgaagtttttgacacaacttttcacaaaagtacttgagttgattgatagttgatatgattagtttcatcatcttttaacttttttagcaaatgtaaataattagtttttgttttatatgtaaaataaattacaatgacaaagatgcaaacgtgtacattgatcagtaggagcctaatatcagcaacaataattctaattaatatttcacactcgatcccagaagacatattttgaattaaacttgttgtgataaacttcaacctcaactttatacctatgaatatgaatgataaaaaaatttgagaaaaagtgcaaacaatgcagtggtttttaaaactgggcaagtaatttgaatgtcatttataaaaatgattacaataagagtctaccttgttttaggtttctcaatgtatctaccacaaatacatgtatacgtttcacttctttgggtctgcactcttataacaattggtgcatccttcacaattccatctatttggcccgacaatgattttactaattgtagcaacagttagacattggatctcctaatagcatactttcataatactatactaataacacaataaaagatgcaaacgtgtaccttgatgagtaggagcctaatatcagcaacaataattccaattaatatttcacactctcgatcccatgagacaaattttgaattaaactttttgtgataaacttcaacctcaactttatacctatgaatatgaatgataaaaaaatttgagaaaaagtgcaaacaatgcagtggtttttaaaactgggcaagtaatttgaatgtcatttataaaaatgattacaataagattctaccttattgtaggtttctcaatgtatctaccacaaatacatgtatacgtttcacttctttgggtctgcactcttataacaattggtgcatccttcacagttccatctatttggcccgacaatgattttaccaattgtagcaacagttagacattggatctcctaatagcatactttcataatactatactaataacacaatattgtaaattaataagcgagaaaaaatagattaactaaattaaatgatggtgtaaaattataaattgatacaaaaacatttgtttagtctcattaatctgactaagggtcttggcacttgctttctacataaaattttcctgctttgaatattgaaagattgcataaaactgtgattattgattttagatagattttcactttgcttatctatttgcatttagctattaacatcagagttgaaaaatatcacataagaataacattatttagacttataatcttattactaagattgtgtatataaaaaatattcagtttaaacctgctcctaaattttttaatttcttcaatatcaacattgttgaatagtttgcaatagcaataagagtttgaggttccaagtggaaacacacctacaacaatgaacgtgaatctgttaccattgcttatttcttcattgctcaaacccagcaaaacagagtccgtttattgagagtttttagaggatgaagtttgataaaagagagtacaacagagtccgtttattgaggtcaaaatcaggggaaaaagaacactgaaaatgtggtactgtattctaaattaaagtatatttaagattggttttcactcaattgctatggcatcagccactcatatgaactaataatctaaagagttctttggtttatgtttttgctgcttggttgtttctgcttctatttcatatttcttgtgactcttattccatcattttagaatgattacaacaatagtcaaacaacaacatgagacctatgctaattcaaataaaaattttatgcggagccaatagctcacttaaccaagctcacggaggtcctccaaattatcagtctatcatcaatagacacatgtgggaaaaggaaagccagaaaagacctcaaaagatgaaataatgataacataatgcatgagtaagatggaaaggaaacctgcaatcccttagcaattgcttattcctcagcccttgtaggctcaattgtattagtatatacatggtcattttcagagtccaatgctaaatcaccatgagcattctacaacacaaataaatacatattataatatgagacaactcgacaacacctctccttgataaaagaaaacaaattcacttttaattttgaaataagaaaataaaaccatttcatccttaccatgatggacaccttgctcagtctcagtcatggactgaaatactatccatgtgcgataaaaataaaacaaagcaagcagtaattccaagagacagatcaaaaatgctttctcagtcctaaccccctaagtgcaacttttcaatagaacatagtccgtcattttttggcgtacatacaataatcatagatcattctaaacttgtatactaaaaaaagttaaaccatatgtagcaacatttggatatttagcataattgaggtaatgggtttctagagaaatagtttgtttatgttacaccaaaccaagaaatttcaaacccttactacctgaaatatatatagtaatgacaatacacacaaaaaatacttagatttctaattaagaaaaaccaaatagtctattcaaaaaatgtaacatgaccaaacaaaacacaaattatatatatatatatatatatatatgtgtttcttttatcatattgtagtatatcagtccaagtccatattttcatttgaaaaaaatcataaaaataagagaaatgaaataccataaaagaaagaggtgaactaaacaaagtgaaaagatactcagacacttccttttttcttccattttttctttccataaaagcctgcaaagtaaaaatacatagatattaagcacaacagaactaacaatcaagatgtcaacactccttttttttcttgctttatattttcctttcattctctatttttctatttaaacagaccctagtgcactgtcaaaaagtagtgtcctcttctctctattaataagataagactaacaaaataacaaagaaaaaggaatttcatgtttaaaaaacagaacatatattatgaacacccatatcaacataaatgaatataagggatttgaaaaattgtacctaaaaccaaacttgataatgtatgaggtaagactaaaataataaccaaagaaaagagatttcatgtttaaaatatagaacatatttatgaacaccaataacaacatactaaatatttttcaaatccaaacttgtacctaaaacaaaacttgacattgtatttttcccataccaaatgaacctaacaaattaatcatataattaaaaaaatacaatttcagaaatgcttatatttgaagaggaaacaaacctcatcgtagtgagctgtcaaaaaaaccactttaataaatatttgaagatggcttcttggtcgcagggtcgtcaccgtggcttgtcgccttcacaattgtgacctccatctccaacaccatatttgctgagaatgttaaatggattcttaacgtccattaaaaaaatgaaattttaacttttttttaacactttaagttttctcataaaattttacttaattattaaagttcttcataaaattagtaacttacctttgtgagatagagtatacaggcaaatcaactcccacagtacgtgaagtggaagagagacgggacagtagtgcagtgaggcataggacggcaacggtggtgcagtgaggaagaaagagaaagataagagaaaaaagaaaaagagaagagaagatggacgaagagaaagagaaaaacggaggagaaggatttggtgaacataaagagacagagatggagcgaaagtgtgcaaaggaagaagaaggacacacctctgaggaaggagagcgacagaccaatttgagagggagagaaagtcataggaagaagaagaaagacaaagaccaatttgagagagagacaaaaatttaaatttcaaaatttgaaatttttgaaaagctgaggcccattagtctactttttgaaatttaccattttatctaagaagtgagacaggtgttaacatatgctattaaggtaaagatgtattttacctggcctaaagatttcttaaatagatagtagatgaccacgctactgtcatttcctctgcctaaataagaaataaggtatatgatctctaaagtccaaactttgtaggagatgcatagagaagagtcaaagataggtaaatgctaaggattgttgattatgctatgtagacttcattgaactacatccttagtttcatattatcaatgctggctgatttcagttcagaacttcaaataccatgattccaaaccaaaactcagcatttaattcatactaatgtacaacaatcagaatggaggagtgtgataaactaccaatcgctaaaattgtgaacaaattactgcctatgtacacatacatatgaggacaatataaacacattattatatttgtaaggatatcacttatcactaaaatgaaaaacaatacttcaatatagaatatataaatattggccgtaataaaggtatagaaagcttagcaagataatattaacatgatgaatctgattaattaaggaatcatgcagtaactaccatgcattttgttattaaacatttttataaagaagaatttgttcagtgttttattgtatctttttaatcaactcaattacctgttggactatatctccatttattgagttttcagtaactccttaaatgagggaatacaaagtgctttaaaaacgaaatgctcatgttacattagtgcatataaagagtgggataagtaccttagtttcagagtcaacatcttgcatgatgaattatatcatgagaaaatcataaaggtgtgtcttttgagtaaatagtgtaattgaagaatataaatgaatttaatggatacactgtcattttttcacaatctaaaaaaatactaaatttgtatattagtggaccactttagttagaatttatatataaaatatattaaatatatcacacacttaaaacagtcactctaaataaggttataacaacatctatagatataacaacaatttttttattgaaaaaaaagtaatgaccaacccagccagagcatcctttagttttctatgtcctgtaaataggaagagaatgagagaagaaacaggaccttgttaatgtaatgaccagagccataaatcaaaggtgagaaaaattgagcaacctttaattacaatgaacagagccatgaaaatagagaatgtaagtatacaacatcaaacaaaaacaaatttataacaaaaaaacacatgacatatcttgggtgaaatcatgtgtccatataatttcattcatatcacaaaatcaaaatatcttaccttaatagcatatgactgcaacaatattaaagatgaaattgacaattgaaatgctttgtactactaacaaacatttaaattactactcacaaacatttaaatcactaccatattacctgcaagctgcaacacagtgcacataagaaatggaccttcattgtgtctaacaaccgtgccttagtcatattgcaacacaaaatgtcaaatctgaatcatagttatgcaaacaaccaaacatctacactccaatgtcaataacaaactaatattaaaattaaaaaaattaaagacccaaataaattacaaaataatttattaaaatatcctctctttttttcctagcaaagtacctcagcttatcaaaagcaagacaaagacaatcaattaacacaaatataaaacacaacaacttgaaaatttacatcaacctctaacaattcctcagccactaaacagagagaaaaggcctaaaaaaatatgaatttttcatcagaacttccaatttattaatgagcttttgtaaatacgataatttttataggaaaatttacctggaccacctcgtggtctcttcttcagccatgcatgtccttatggtagtgctctccctcgccaccaccctcaattcaatctaaagaaaataaaatacccaaataacaaaaacacaaacaaaacattagcttacaggacgttgaagccctgactttgtgttgttggtaaagggtggttgcatgtctaaattgtcatgcttgtgtcatgagttgcaagccgacggcttacggtgaggaagcgatggtaccgtgaggaagaaaaacggagataagagaaaaaagaaaaagagaggaagagatggagaaagagaaaaacggaagagatggatttggtggacagagcgtaagctagaagaagaaaaaaatgaaggtcacataggaagcggtggagcggaaggtagaagaaaagaaaaatgaagaaagaagatgggagaaaagaaaatgaaggtaacgtgtatctgccttaagttttgaaatttgaatgaacttttgtaaaactggaaatttccattttatcaactaatagggacagctgccaacaaaataaataagggtaaagatgtattttacctgacctaaagatttcttaaatagatattagatgtttgttttatggatgagagcatgtaatagtttcattttgagctggtccaacgtgatctgtatactttggtggttggtcatggtggacggtatagcatgagaaatgctttacattcgcataattcctactgggaattttggtaaatgagtgataatcaaattcgcttataaaaaaatgcactagtgttattaggaatggcaatgactagggtttggttaggcatggcaatggagcgggtattgcattctctgtccgtcgactcaaaaatcgtttcccgtccccttctcaaatcctcgtccggttttaaaattcattcccatcttcgtcctcgttggagttgggttttcttcgtcccatccctgttatttgattaaaaaaaatttaaaaaaaattattaaaaaatcgaacaaaaaaattaattatgtaaaaaaataataataaactcacatttaaaatatgagattataatttaaaaattaaaaaataaaatcaatcaatctaattaaaaaaattaaaaaataatatatgtatatatatatatatatgaatatttttattatgggacggaagtgagtgtgacgcgggtatcagtaatctcatacccgtcctcacttttggctatcgaggaaaattcgaacccgaattcgataaactaggttttttcttgataaaattgggacggattcggacgtgtattcatgagtttgggtctcattgtttgatagagatctatagtatttgttcttatatttgtctttaaaaaaaaaaatacttgtcttattccatattgacgtgggtagttattttaatttttatttcagtatccattggatatttatatatacttacatctagtatccttactttagttatgtataaagtttataaaacaataaaaatatattaatttaaaaattatgataagtaacttaaaacataatattaaaggtatttacacataatattatatatgattttatctataagaaataattatctaattatcaaagtcaataaagtgattaaattagttaatttgtcatgaattttaattatattttaatattattcatgacattaaattatttaagagacgattatttttcaaagataatctttaataaaatatatatatttttttgataatttaataaatgtactcatttttataaaagaaagaatacatatcactaatagaactcatagttaattatgagtaaaaagaaagtcttatatttttataattaagatgaagaaaatgttttattttatttcttacatatatgagtgaagataatattaaaaacaagtaaatataacatttattttttaaaacttaagtcataaataaacaatattaaaaatataatcatttcacactataaaagtcattaatatgtataaatttatattactaatttgaaacaaaatatcaactcataattaaaagtcaatcttaaaaaacttatcatcataaatttatacataaaaataaataatagtttaatatatttatataaaatatgaatcaaatttaatataatgatgttgaattaaaattatttattctctgttagatagattgttattgttagtcataaaattagtaaaatatattttttatagagaaatatatatatatatataatgtaaattatttatttaagtataatatattttaattacatcaatatataaaatacatgacatatatgtgttggatgagatgggtactataatactcgtatccacatctatttccgcaaaaagtacaagtaaatactcgtttttatccttaatcttaataaatgaataattatcttctctttttgtggatacttttacccataaagtttggctccattttttcatcctttattcaaattcatgtttgtatcctcaagctgattttccatcttttacaaagtgacaaaatggaaaatgaaaatttttggaagcaagggagggtagattttgtataaaaaaattatgcaatggacagtttgtaaaatgataattttgtcactagctggtaaaatatcaaagacaggtattaattattataaaaattcaataatcttaaaattatttattgcattttaataaaactaaaacaaggaaccaatcatattaatgaaggcaacaggtagtgagtattgtaattgtcatatttatatcggtctattaaatcacttgaaaatttgtacctcctacaagaatttgattggtttaccttttgttcttttctattataattttgaacaaaaacaagaaggaataaaaaacaccagcacttatcattatcattgaatatcgctgttagggatcatcagggctgtttccattttggtttgatttttatttaaaataaaatttgaataaaataaaattaatatttgataatttgatttattttgatttttataatttttattaaaatattatttcattaaaatttatatactttctttttatattttaaattaagatattaaaaaatttgttaatgacaatttacaaaacttattaataatatgttaaatcttttacgataaaaatatatcaaattttcatttattttaaaccaaacatattgtaaatccaacctaactaatcaactttttaaaaaagtatccaaataaataaaaaagaattaataatgtttaaatcaatttaaatttaaacatctctattcttatgaataacaaatgaactagattgatctatcccgccacatcataatcttgccaaaagatggctggggagggttttgttgaaaatcagcatagtgctacttaagggtgagttgaccgagagaagaaaataaaaaatgtttaagtttttaatataagttgacaaatttagttaacgaacctatcctatagttttatatcaataacttaacctaaagttgattttgaaaatattttattttactagtattagagaaattgagtttataaaataaactaacaaaaataataattttttattttatttattttttgaataagtgaattaccaaccatattgagaccataactttataattgccaatcatattcatatatttaataacattttacacattttttctgtaaattcatagcgtccgaacgagacaacctcctaccttgttctgtcatttttaagtgggttgggcatatggatctactccactttctcactatcaccattttcatccttctttgttattatcattattgtacccctttgttgttattattatataaatacatttttaaattaattttaaaaaagtctgtaattagaaaaaaatttaaaaaacacagtcgttattttttttagtgttgtacttcaactggtatgggaagtagatgatacttttatatttttttatacatttatttaaaattaaaagcattcgtacaaatacaatacaaaaataaatttccaacttattcaaagcgcgtttgttttggcattaagtctcgtccccctccccccatgtacccaaaataaagaacccacaatgaaaagctgtaaaataataaattagtttcggaacctcaaaactagaagaagaagaagaagaaaaatacacctaaatcacattcatttaacacacaggttttcaaccttcaccatagaactcaactgtttatgtatttaatctactcctatatcgtttactttcctaaacaacattatcttttctaaagaaaaattgtcaaatactattaaatactacattaattatatgatattaaagttggtgggggcactttttggctggttccaaatggcccaaagaaacaaccaattgggaatgttgagtgattcatagttctaatatttttagaattcatttctatatttggtgcttcagataatagtagaataaatatttcacggggtaaaactatctttcctatataatccctccgttcttaattctagattttttcaaaactaattcacgtttttcttaaagaaattaaattaatcatataaaacctgtacattatctgtataattattataaaattaactttttcttatttatttattaatttaattacttcttattaatgttgggagagaaaataaataaaaacgaatatgtagcataaataaatttttaaagaatgtcttatacaatgaggaatggagagggatacaggcaagagcttgagccccattcctttagtatttcttgcatacatgcatatatatatatatatatatatatatatttaaattaattaatgtaaactatataaaatcaattctccatgttgttattattataaaatttgttaatgtaaaattaattgtgttggttgttattattactataatggttaaaatgataattaaaataaaataatgtaaaactaattatttatttattatttttatgatagaggttaagattattatcatttaaatttaaaattattcctatgttatgagtaaaaatagtaaaataaatttaaaaaattattacttattaaaagttaaacatttaaataattacatagagagagaattttttttttagatcatcctttaataaatttctggatccgtatatggtcttataaataggagcattcacaaagtcaaaaacctgtccctcagtcgccttttcatcagttaccctcgcactttgttggcgtttgttaacattgctactgtctccaaacacactcataacattccatcacctcacttcccaaaaccctaatctttcacttttcttctgttgtcacactgacccaactcctttcattaaaacttcataagaggaaccctttttagcacacccacacgaaattatcgcctgttcagctcagggttcttgtgctcaatatcactgattcaaatggcaagtaaagtttcaatcttcttgtggtatctttaagtttttggtgaatctctgagcacccattaggttgagtgttgtgtttattggcaagtggggtttggaggtggaaatcttgggagttgggtggattggtgagagaaaaaaaagcagttatggtgactgctgagaatgagattggtgaggatcagaaggagattgctgctcctaagtctccatggaagacccctactgttgatgggaagggaggtgatgtgtctgtgatgatgggcaccgagtcttggccacgtctctctgatgcacagagaccacccaagaatcttgagactgctgctgctgctgctgcttctgtgacaagttctggtgagattgctcccagacctccttttatgcaggttagtatgttctttgtgtagtaccattgtgattgtgatatggaaaatgtaatgcatagatttatggaaatgtaatatgttcttgagtttgtatctatgtttttgtcgtcttgtattgtaacaaaatttatttgtttaggatggacatttgtgtcttgttacgattttcatgatttaagcctgaatattgcaagcatgacgattgtggttactgattaacattagatggcatgtaaataaggaatagatttcattgtgttcttacggttttacaaatatgttaggtgcttattgttttttcctcatctatgcttttgattttgtgatagaaataatagttgtatgcttaatgcaacaaagttcttcttttttggtattgaatatcttttcttgtttgtgcgtgcatcggtttgtttttcaaaaaaaggtgaatggtgctggaaacgttaacccaatgcataagctgccattatcacgccatcaaaagccaggtgctaagcgtaactcaaatggtgcacctccctttcctgtaccaattcactatcatcaaccagttcctccattttttcatcctatggtaccgcctccgcacattgctgttcctggttatgctttcccaccaggtccaggaccttttccgggtgcagaaaaccctttagtgaagcctgtttctcaggcgcccggacaagcttttgctccacctactcatgctgttgatggcaaaaatgttcagcctccagtgcaggaagatccaaatgcctatgttggcaatttttctaatggaagaccaaatatccaagaacaaggtgaccatctcaatcatgcttggcatcatcaaagaccttttccttccagagcaaacattcctatgcaacatggtttgggcccaaggccatttatacgacctccattttatggtccacctccagggtatatggttggtccaagcttcccaggtaaaattccaattcacagtcctctaatttatgcacatagttgtgcaattacatagtgacacacatacatctatgcttcctcttgtgcccagtcacttgtggatttctcaacttgaatgctgtgtgaggatttttctctgatatttttattttttaatttctccatcagttagttttgtaatccaatttttatcttttggataggacctgcacccgtttggtgtgtccccatgccacctcctggctccattagaggaccccatcctaggcactttgtcccatatcctgtcaaccccacacctcagccaccgcctccagaaactgtatcgttgaggactagtattgtaaaacagatagactattattttaggtaagtaatttcattgttgaccctggcttctatatcatatttgatcttaatctgtttttttttttttttttttttaaatctgacatctgctaatctatattgtgagaatgatgtttccaactttcgattgagtgacaatatactgttattatgtatattgttattgcaaagtgctgtactattagattcatagatgccaagcccatatcttttagattaggataattgcataaatttagcctttggatgggattgttgccagagatgatgaagtggaactgatttgtagtgtttgggcttcagattgttaaagcaacaggaacaagctaatgaacattagaaatttcttaggaagtccagtaataatttctgttgattccattttctgtgaaaataaacagaagtaattcttatgataaagataatctttacaacaactgctgacttcagagccttcttttggcagtgatgaaaatctgcagaatgaccattaccttatttccttgatggatgaccaaggatgggttcccatatccactgttgctgattttaaaagggtatgtgtccaaagcatttttttcctcccaaatgtattataattttgcagatgttttctgttggtgagttccatgttagtccctgtttctcacttgccttatatgatgtgaattatcttgtaggtcaagaagatgagcacagacataccttttatccttgatgcacttgagagctctaatactgtggaagttcaggcaatttttcttttcttggtttagttatttactatttactgcatgcttgcgggtgtagacagggctaaggttctcattaactctagaatctagtttgttgcataaaatactttcgcccctaagctgaatactgatggtttatattcttcttgtttatctctgatattaatcttgggcttgggggttggtagtttcaaatgtttatgtcatgaattgtacatgaatatttttttaaaatatttttagagtaatgggatgcaatttcatgtttgtgagaagtttaatgcaacacatttatatcctattgatgatttttcaaaaattaaattgtcaagacctttattaaaattcaaattcttgtgttttgtattccataatatcaacaatgattttggaattcagattattcagtctctattttttctttatcttgctctagcagggaggctgattctttggtttgaacttgtgacttttgatcacaagataacaacaaccttaccgttgtgccaaggctcaccttctaataggcatatttaactgtttcactatatttcaaaaggaactcagttttgaaatattgtctacattgagtcatagtagtcaatagcgtgctatagcaggatagtgaagtggagtggttttcaattgtgtctacaatagcagctttttgcatgctatcaccgtgctactatgatatatacttataaaaaaccatttttatccctggaacatcattttttttgggggtaaaatattccacaaaaagttacctctgttttgacctctattccttcacacattataggactattttttatcccgtgttctgtgatttcttctacctttagacttcccaattcacattctgctaatattttttctatctaatttattatgtttttttttttcatattaatttcaccatcatctttcatttgttgactttattactatgttcttattgctccaagattgatggtgattgtgtgtgtaaaatgtgacctattatttatcatgaatttctttaatgttgccatttgttttgttttttgagttatctgcagtataaatttagtttgtaattaatatttaaaatagtggttgtctcgcttcttgcaataccgctatagaaattttcagggttagatgacatgcacagctatctgaaattgataactatgcattaagtttccttattaagtatagaataattcttttaagttcagcacatttgtatcatctgtagtatagatgtgttgagcttatgagttatgagaattacatagtgcgagttcgttactgttattcaagagggcatctttatctttgttttggctttttaaagtttaaagcagattatgttacggctgaagtatagatgaattatggagttgaagatggttatgattgttagcttatagatactaatagttagaacttcctgctttcatacgtagtatatttattatatatagaataacacttttagttctataggagccagctttaagtgcatgaaagtttgaagctacttttccaactacttgatttttttttttttttttttgtgttctttcgttttcttcgttgccttcacttgtaacttgccatatttttatagggtgataaaataaggcaacgtgatagttggtcaaaatggattggagtttcctcaggaaattcaggatcaccaacagctcagattcaacagggccaacttgtagatggtgctgtcaattctcttgagaatagtgatgctgttggagataagacaaaggagacttccgaagaaaatcctaaagatgctgttcatgactcaattttcgcagaccataatcagccaaacaaagatatgttacaagtttcacatatgaaccaagaaaaaaataatgagagccatcgttataatgataaatcacatgaaggtgtcaaattctgtgatgttgaaacaactaataataatttatgtagccaacaagaaactgagcccaaagtatttgacaataatgaggctggaaacatggatgtcttgactgaaatggatgtccgagacctttccaatgattttggcaatacttttatgctcgatgaagagatagagcttgagcaaaagatgctaaggaagactgaactttcttctagtggaaggtacttcgtagttctgtcttatcttattgatatctagtggaatatcagcaattgtttcatttataaattggcacttggcttgattgtgttcctttatatattttccacaattttcttcgaagttaataatagacaactattaatttcttcataatgtgaaattcaaaggttcctcttttcctccttgttaaaactgtgttagtattctgtttgagatgttagaatacttgtctttattttaggcatcccatatggaatgatattaggtgatttttgtgccatttcattaagcatatcatatgttcacttttttgttcaaatattcatctgatggaagttgttgtctaaaaggaatgatgatgaagatgatgagatggctgtcattgaacaggatgttcagagactagtaattgtcacccaggtattgctgtttataatttaattaaaatcaagttcatatgtttattctttcctctaaagtggtatcattcaaattaggtttcaattttacattcatattgcccaaacagcaatggtgatgaaaattaaaataatttgagggtcttctgatttgatggatgttcagaggcgggaactacataactatattgctctgtatactacttaattataagttataactatacggctatgtaatgtcttttttttttttttttttttttttttgtgtttgaacgaaaactggtttaaccataatatgttagaatgttaattacaattaattgattatttaataattttatattttaatgcaaggttatcaaatttaggttcaaatcgtgaatcattatttgcatcaaatcggattcagagacaatgaaaaataacttaatgtaatagtttaaacttaaaatagataaaaacaacttaatcaaacatcttataaaacaaaattagtatgtgaagtcactatttttagaagaatgaaaacaaagcaatgaaatagccaaatagagtgcatgcattgaatgaatgacaaataaaataagtgcaataatcaaataggataagtttgtaagtgctcatcatattcctttccatttaacaatttaagcttatatgacttctcaatttctttcacgtgaataggtaaaagaaaggtaaagaaaaaaagaatgaaatgagattcatcttatgatacaatctatagatagatgtattgtattgaacgtaggattcaaatcatgaattgtaagattctaataactacgttctaatgtacagaatggtgatcctaaacaaagatctagaggtggtagtaaagaatcaatatccatttccaatgagcttgcttccgcaataaatgatggtctttacttctacgagcaggttgagtcactattcttattttccctgttgtcttttatttttcagatcatcatctttattaaatttttggttgccccacccattatctacaggaactgaaacataggcggtctaatcgtagaaagaataactctgatagcagagatcgaaacataaaatctccaagccataattcgggtgcatcaaatataaaggcagttgagaatattggtggaaacagtgttgaagagtctgggagctataattctcgaaggaaacaaaaagtttttcacaagcaaccatcttcccttaagcagcggtttttctcaagtaattttagaaatcatggaactggtcgaaactctcatggaatcatatctgaaagcccgcctagtaattcggttgggtttttctttgcttctacgcctcctgaaaatcacgggtcagttcaaaatgattgttcccagtgctaatgactgtaatattggtttgcttagccagcctttttttcacttttatcctttactggaagaatatatagtaaataatttgttaaattaagaatataaattattactgtttcagagagtatgatatgacatgttgattgtttggtatgacaactgaagctatttccattaattatcttaaatttgcagtttcaagccttccaaattgagtagttcaccacatgggggtctttctagtagtccccatggggggttttctagtagtccacatgggggttttgctggtagtccgcctgtgggttcaatgccaacgtcttttccaccgtttcagcatccaagtcaccaacttttagaagaaaacggtttcaaacaacagaagtaaatgataatgcatactggttgtatgcatgagagtggtactaggatatagtcctataggatttgctttttaaaaattcctcatgttagtattcttcctttcaggtacttgaagtatcataaacggtgcctgaatgatagaaagaaacttggaattggttgcagcgaggtgaactccatttcttacgtttctatgaaaaaatatttgtaaagaaccacattggtagcccaccaattgaactcattctcaatttctgttcctgttacttttattgtgtatcatgcaccgaatgtttaatatattgcctgccttttttattacttaatttgttaattgaatgacttatcttctaaaatactttgtgtacgagtatgttgcaatagtttgagtgaaaattgtggaatagttacaacacgtggcattttcaatattggtttgcattggtcaactttctctttttaacttaacaatgtcattagccgaagctttcatatcaaaatgagcctggatgcagtgctgtcatcttcattagctcactttgtatattatgcattcatatttttttatacatttcggttttcatattatttgcaaatttaatatttttattttcttgtattgtattctttttcaatcatacacttgcttattctggtaggtttttctttctcctccttttgtgtgtcaatgcaggaaatgaatacattatacagattctggtcctattttcttcgagacatgtttgtgccttctatgtataatgaatttaagaaattagctaaggaagatgctgcggctaattataattatggtatagagtgccttttcagattttacaggtaccaattccaattctgtcttttctcatttgtttgagaagatagaaccatcatttagatttcatcttctggtccattttgtcgagtaaagtaatttcaagtcttctgaattttcatctattgtttctttggagaagctgattaaattgctttatgttgtctatttttatttttatttttccttagaagacatccaagcatagttcttctaatttttgaatgatttcttgctcagttatggattggagaaggaatttagagacgatttatacgatgattttgaacaactcactctggatttctaccataagggcaatctgtatggcctggaaaaatattggtaaaaaaccaaattctcttgcttcttatattctactgcatattttctgttttgtagtttcattccttttcccaatttcatgtgagatttgttatagtgaaagaagtaaacatattggttggttagtgtataacctaagttgtattctagattaaaaagattgttcactggtctatgaaatctaattatacattaccttagttatatttttgattatttcctgtttgtctgacttgtttgtgtcacaaaatctttataacatagtttctaactgcattattggactgaaatggagcattttgtttattcttgatggtagatttgtggaacagtatgagcagttctaaatgttaagaatgtgcatgttataacactactcacctatgcttagctaatccaaaatagatcatcatattggaaatatgttagtttctatgtcaaatgctagcatactattttattagtattgcatttctatatttttgggtgaatggaggttgccatattctaaggcaaggcactgtctccctcatacctgttagatatagagaaatgtagttttcttctgttgttttggcactcctcttcaccatattatcactctctagaacttttgttcttacatatttatatttatatttatggcattggcagggcatttcatcattaccgcaatgtccatggccagaaagaaccgttgaatcaacaccctgaactggacaggttgcttcgagaagagtatcctagattggaggatttccgtgccaaagaaaagagtatggtaaaagaggatgtcaattaagttgagtgatatgtccaaatggtaaatacatatggcagagttttgatggcatccccaattttgatgagaactcttaacaacataacaatgagttgttgtggagtagcggccttctttttgaaagaagattgtttgtttcttctctatatttggttgagttgattacgcctcatcaagaggattgctgatagccaagtcttttcaggtttctttgatggatcattctatatggtatataccactgcatcctttctttggtggatcttgcaaactttgagagacacattttcttttctccaaatgttgtacataagatgatagactagaagttgtgacattacagcataagaaaaagaggttcttgtttttatttttggtgggggttaaaaggggggaaagggttgtacttatatctttgccaaatttgaacaataaaagtgagaatcttcttactttgtaacttggcgtgctcatttaatttatatgtaacaattattgtcttaccaaattgttattggtatggtttataaagcaaaatgtttttggtacaactaaaatgggacaagttgtctcctttaattttgggagagtatttttggaatgattgcctgtgaaaaagataaaaggcaaggtaaaaacaattatatgcggtgtcagatgaaatgaatttaaattatttgatgtttcttaatcatcatcaacatcacatttaacctaagttaattggagtcggtggtagatgaactcaatattagatatgaaaaagtttaaaaaaaaaaaaaacaaatgctaagaaaaagaagaaataagacaagagaaaagaaaaaattatttgatgtttcttgataaaaaaaatattagttaatgtttatagcaagtaaaattagtcactgaaatggagatattcatgacagaaccaaaaaattatttaatgttcaagtaatggaattgagtttaaaagctgaaaacgtagttttggtggttgacaagcctatttagcagcatcacagccaatgaaaacatgccagtcagtttccaaattttatgaaggtgaggacaaagataaataaatgactctaagaaatccatataagcactctctattggagatgctcttattaccccatatcaagtattcttgtttcttaatttattgtgtgctctttttaaaacaaaatcattattttgaaaaaataaaaatattattttctaaattctgattgcacaaaatacaagaacatcattgaaatgagaaaatcatatatttaaataattttttttaaaaatttttaaatttttatatttcagaattttcttaacattttaatttgaggtcaaatttgaattcttaattataacaatatattattagatacattttaagataatttgatgttattgaattctgtttcaataaattactttttatgttctaaaaatattgatacacaataatataggctattttgagtatttttttttcttttgtaattaatacttaagtttctttgatttggtaattatcttataaactactttgctatacaagtttattttagtgacttattttcataaattatttgaagtagtttataaaaaataaattagcttatagtttaatttttctctcttaattttatccttattattttatttgacattcggttttactctttcattcaatttaaaaaatcatctttttgttgtttaaaaaaaaatcctattatctaatttatcatttttagtaggcatgacaacgagacaggatgagttttgcattccccatccccgccctctactctaaaaccgctctccgatccctattgggattaaaaatatataccccatccccgatggggtcgattttccccgtctcgatccacccttgctgattaattaaaattaaaaaattagtaaaataatataacttttgttattgaaaaaatgggccgaaaatgctagttacataacaaaaaaataataaaaaattcacattcaaaatatgagaatgagctcataattaaaaattacaaaaccaaatcaattaatccaattaaaatcataaaatatagttattgcataaaataaggacatgcatatttaatttctcacaaaatatgatatcatttaaatatatattgtccaaaaattaagtagcacatcatatgattaagtatcacatccttcaaattacataataaaaaaagaaacaacttaaatataattttttaatgttatttttacggggaaaatccgaccccgaccccgaccccgaacccggtcgacttgatttttcctcgtcaaagttggggagagttcgattcgatccccacggggtcagattccgctgtcatgcctaataccaaatcatgtttttccctctctattttttagtaatattggtgactttttaatatttcatttatcttttaaataaattctaaaatatattttgtttaaaaattaaaaaatcaatcaaattacttaattaaatcaatctaatttttttggattgataaattttgaaatatctaaaaaatcttattgtattcaatcatttgaaatattttaattggtttaaatcttttttttttgtcaactttgagattttcaaataaaaataggtgaatattgacgaatgcagtgcgtttatttaaataacagtataagggaagggaaggaaggaaatcaactttggtcgactcgattttgaaagatttgtgactagtctgtaaattgaaatataggagttaattttagtttaattatattatataaattattttaaaatttagtttaagtcttatacttcttaaaaaattatttaaaatctcactttttagtgataatattaacaaataaaattatgaaattacttataaataagttaattaatataattatgtaaatttaaactttaataaattaataaacatatataatttgaaaagatgatgataaaatttatataataatatattatgtatattatttagagaaatattaataatatactccctaacactctatttataacacatatgtaatattagttaaaatttattaaaaactataaaattgagaaaaagtttttaaatgagaagtaggatcattaaaatttgtgacttctaataaattttaactaataataaatattgtgtttaaaataactttttaaaaatgtattactataatttctcatttatttggataagcaactttgaaagaaaaaaacaataaatttcaaattttaatgaataatgaatgtgacttgggcgccaaatttttaaagaatagcgcgtcatgctttgttaaataagaagccctgtgaacggaaagaaaggcaatttgagtttgaagcttcaaactttgaaagccataaaagattaaaagataaaagaagaaaacaatgtctgagttatataataacgattggaatgatgatgtttatgactacaatctgttttttgattgcgatgatatatggtcgacgctgaactttgctacccagattcctatggcggaggacacccaacaccaccgcacaccgctgcacgttgctaccctggttgcggaggacacccaacaccaccagacaccgctgaacgttgcaaccctagttgcggaggacacccaacaccaccagacatcgctgaacgttgcaaccctagttgcggaggacacccaacaccaccgcacaccgctgaacgttgctacccaggttgcggaggacacccaacaccaccagacaccgctgaacgttgcaaccctagttgcggaggacacccaacaccaccgcacaccgctgaacgttgctacccaggttgcggaggacacccaacaccaccgcacaccgctgaacgttgctaccctggttgcggaggacacccaacaccaccagacaccgctgaacgttgcaaccctagttgcggaggacacccaacaccaccagacaccgctgaacgttgcaaccctagttgcggaggacacccaacaccaccagacattgcccaatcacgtgaaccagattgcgtgggctccggtcgagttgcccagccacccagttgaggcgctggtgcataacggtggtggttccatgatgcagaacgctggttcatcggttcgacgcaagcaagggagaaggaatccatggactgaagaagaacataagtaagcttttaatatattgtatagaactcaaatgaatggaagtttctcaatttttcatcttatagttgtgttttaatggcaggttgtttttacttgggctccaaaaacatgggaagggaaactggatagaaatatcaaggttggttaaaacaagatcccctactcaaattgccagtcatgcccaaaagtatttcattcgccaaaatgcctcacccatacagaaaaaaagaaaaagcattcatgatataaaattacattacacaaatgaagttccttgcatcattgatccacaaaattcaattcctcttactggaattcaacaagttcaccaaatgcaacaaaaacaacaaatgttgccgctgaatccaccaaatagcatgactcatcaaatgagtggatttgattctgcatatcaacaagttcatgaaaatcaacaaatattgcacgtgaatccatcaaacagcaggactcttcaacttagtggatttgaaaattgtgatgaccacattggaatacaaggcttgctggaagctgtactatctgtactattttcaccatagtatgattctttaatcctagcataggttgtggtctggtgtaaggcgtaagagtagtgaacttatcaagtaattagggattttgatatttgtacatggattagatattggaattttctcatcaattactttcttttattgactttgatgtgcaggtcgtgaccaacttttagtaataatattacaatccatttcattcttaaaaggaaaagtaaacttctatttttgataataaattttaaagacttcttcctcatctgatccaagatgaatagcacacatgcacttgacatattagcatactcgctgagcaaatgtatagtagcttccattttttcaggcttacactagtgccttttcgatattcttagagatgagtccaggaacatccttgaggggatggaaagtgagtccaacttggcgaaggtggccatcaatagccccttcactgtatggaaggatggtgcaccatctccaaacaaggcttgacccccaaggccatcaagatgggtgtgactgcagtgatctcagaacaaacgacaagcacgagagcacccttgttgttttcggcaaggtctttggccagacgaagcatcgtgccaccggcaaagcagccttggtggtacatcatgtcgacaccgctggtggtgcaaaagatgagatgggtaatcttggacttgggttgaccaccatgtcttgccttgcatccaatgaagttgggaggagtggcggtgccaataggcaatagccatgctgacagtggcagggcattctgcacgttgtgcctgacggatctcttcaacactgttaattttctgaagcaaagaatgaaagtgaataagtagcaacgaaagaaaaggctttgatggatgttgcaaagtgggtttggaagggtggatatatatatatatatatatatagagagagagagagagagagagagagagagagagagagagagagagagagagacgtagaataatagaatgatgcataattgaattgaaaagggtaggtacatgcatgcagtgcatgcttccttcctctgatattgcgcttgtggtgtgcacccactgcatgtctaagttcaccaccgctgacaaccaacccacttgtttcctctttggaattacttttctatttctattgctgttttttaaagagttttcagaaaaataattattttcaatcacgtgttgtttttacgttttcctctttagtttattatgtttcataattattttactttttatatatattaaattttaaaagttttattttagtcttttatgtttttaaaatgtattattttagtcttttttcaatttttcgtttgaagcgtaagtatttcgttaatttttaaattaaaaatgatcaaaatgatacatttcaaaaacataaaaaatcaaaatgatacattttaattaatggatttcctaactaacctacccaagattatctaaccaaattgggtaatttaatataaaatattatttttaaattttatcaattaacaaatgatcactagtatacaattaattagaataggtcattaaccaaatctaaccaatttggttatgcagattgttgtgaggtcttacatgtttttaaataatatattttataaaattaaaaatattatttttatattatcattacattaaatagaataacattattgaaataagtaaataatatatttgaaggaaattaattttaaaatattttagttttgctttaaatttaacttatatttcaatttttctaagcttttttagtttgcggcaagttcttgaattcataattacaacaatatatttagtaaatatttttttaattatttactaaatttattaatgtagaagcgagaaaaaggagtcaaagtcattaaaaagggcacatataattgtagattaatttattaatgtagattattatactttatcttttgactatgacttagatgttgttatgcttgcaagactttggatatgataggaacgagtacaatgtactagaggtgaacaaggcttagttatgagaattgcatggacacaggatttgttcataacatatgaaggggtgaaggaagagacgtgtttcatctaactgaattcaagacctactacttcttaagtggaggaggctattgttggcatgggatgaaggttgctatatctgttactgaaggtgttgctgcacccactccagcaccttcaccagaaagttgttgtgcttcagatggcattcaagtcaaccaaatacctttggtgttaatctttgtcttgatgtgggatatctcttctgataacaccagttactagaaatggtaggccatatgtactatagcaccagttgtaattgttgtattgattttactttgtgtgatggtaagttaaactatggaattcaaggtatcttttaaatttactaataaattgtttggcctagtggtttagatagtttatatgaagttgtaagttcaaatttcactgtcccgctatcgtacacaaaaataaataaagaatttattcgcacatactactattataatagtaatgccaaacaatattatttgagaaaaagataaaagaaaaaaagggaagagagattgtttatcatgaactaattttaatgttttttttttcgtttttaacaaatcaacaattttggatcatgtgctattacttaaaacttaccaacaaagcaaattttccattagttttgtgtaagtagctactgcaaatgttggatttaaatgaaccctatatagggaagaacaacaggattaataagggaccatattctttggtttcatgcgaggcagttgccaatacaaaatatagagaatccgtatgggcacgaaacaaagtaaaatctaacttgttactacattaaacatttcctccaaaaccaatagtattagatggcacaaaagacaaaaaaattatcaataagatctctttgtgccgtttgatttgaagctcagtgcaatgaagtgaacttttgcgtgatatgatcaaaaagcacacaaaatatcaagcataactgttcagcaccaacatcagaataacaaagagaacaaaaacttttttgttgtctgctgtttgtccgtgttcagggtaggggatcagaatttagaaccataatgacttccattagaaagaaaacaacaaacatattacttttatgaccaacattgcctttgaaaaggtatttgcgattaacagtcaagaacagtgaatatcttttacggcttctcgtgttgaatctgttctacagtcaaggttggtaacaaagccacagcctcaccatcaatcacaagaaggtcatcattcttgaaacaccttgtcttaaactttgcactgaatagcattgagaaacattcatttagaaacaaaattactccttgtataaaaaagaatgcacaataataacagcaggaccaaacttacagatatcgatttttattttctctcagattagttgcttgcacttcaccaataatctgatctccaatatagactgggaacttaaaattcaagttttgagatacatacacagctccaggctgcaattattgaaaattgaagtggccagggaagaagaggaatttaagaaagttatcacagaatgagaatatttcaatgaatgacttcatagcattgcctcaattcacatcattaagcactttaaaatcaagtcttttattcaagttgaccaaatccaatgacaagtaccaatttttcaagcagtagaactagaacccatgttagcatttaaattgaccacttaatagcatgttggtgatttgcattttccaaccatatccaaaaccaaattcacgtcaagtatgccaagttaatgtggaagataaaaaaatttacttcgaaaggacgcggatcacactgacataacgccaatccagacacacgataagtcctttatccatgcttatattttcatgtctttcagaaagactataaaatttaagctttttacatgtgtctccctttctacttctcattaatcatgacacattttaatctattcaataaatgaagggtcacttgaccttatttcacactccttatagtgattacaatttcacatcttatccgtcttcattttatgatactctatttcatgtcataattttccattaaggtgtctaatactcaagtttacagaaaggatgttcatgggggcaaggggatttggatcccggaatcaacatagagttccccaaagctgctgactgtggcagaaatttcacttataaaaagcacaaacaaattaacttttacatgtaaaaatgtatgctacagagtacagagtataaaattcagtctagaaatctaataatagaactctactaatttatctgtttattcacattaatttaatattgagatgagaacgttaactatctcattttaggaggcatatcaaaatttaaagagagggtaagtatgaaacttacaaaatgtgatgagatgatatgaggaaagagagaagccacaagcatcccatgtaccagtggaccttcaaatccaacatctttggcagcagcagaatcagtatgcaaaggattagaatcacaactcaccttggagtattggagaacatcttcctcagtataaacccttgcttttctcaagacatccccaggcttaagtacattaggagttgcagaagtaaagcaccttaggctcagagaatggactttgtgacaatgtaaatttcttatgagcattcttgcaagggttcaaatcaacaaaacaaggccctgatgtggtcccccactaactgtaaatcaagtaaagtacaacttaatattcccacaactggtagatgtggtttcttgaggtaactggtggcatggacttaggtcaaacagctggtgggcgtttgagcagcacgggaaacagtgtacattggtcactggtatgggttcattgctcatggagggatattaacacaagcagaattatagggtgctgttgtcaagggattattggtctcatgcactatgtttgtcaaaatctgataagttttatggagcctagtttttttacggatcaggattcaacgaaacggaaagatgcaccacacaggtaaataagaaaaaaataaggaattacttttaaatttttacaaaataaattaaatttttttaaatatttttttttttcatttttagaggttgagtatatccaacttattttatgtcaatgtaactcttcacgtcatcaattttttctctgtgatattttcatgcattgttaattattgttcataaagtaattttaaaattgatctttaaaaaatattagagaaaatgcaaaaactctatctccatttttaagattcttaaatgctacccatatttatcattttcaagaattaatgtcactcatatctgtcaataggaaatcatgaaagaggtatatacaacattcatattgattttgactttttacgagaactaaatcatgcatttctttaataggctagtgaagaatacacgatggaatgaactggaaacctagctatagccgagaatgagctatagcattagcttgcctcttaacacatgtaaatttcatatgaacatgttgatattttttgcagaattttcacttacaaaaagcacgaacaaattaactttaacatgtaaaaatgttgatattctaaaaaactgtcatgttgatatttttggcagaaacatcattaagtacctttaaaagttaattaaaaaaagtaaatttctattaaaaaatgttcatattctaaaaatgaatttgaaatagtcaacttaatttttaattaaacttaatatttcagtttagattatcagcagaatgaagaataaagatgaaaaaaatatcatggaacaaaaaataaaactgttttatacaaaaaagaaatatatatactaaagaataacacaaaaatctaaactgaactgaataatagaatattggtcaaactgtacaaaacttccatatactttaactttctcattcggttcaaatagaaggcaatttttttttttctgtggataccgcatgaaagttccaatttctttgtaatttaaacgaccagaataaaagaaaataactaactgcggaaaaataaataaccaagttaaattcacgtaactagcattgatctcaaaatcctgatgaaaatatacctatttttaacacaactgagacattcttattaactcgggtcacattgctatcaggagtcgataatatggattttatccgtaaataacagacagatcacaaacaaactttaacaagaacagtaatacccatgtgatctttttgattcatgcaaaccacaactagattagataatgatcaagagtgcataataggaaccacataaaccttaacaatcttcaaaatagcgaaagacttcgcaacaatattcaaaatagtaaaagactaaacacatgtaaaggcatgagcaaaatgccttcttacatgtataataatcctttcctactaccattggcgcccatagttaaactgtttccacaaaaaaaaaataaaaaataaaaatcctatgaaggtcttataaacagcactgttatcagtcatcgcctatccctagaactgcaacagatccttcttcaacaaaagaacattgagctcgaaaccttatcctgcaatcttggcaactgagggacgggaggagcaggcataccagaaccaccatgacttgaagatgtctcagatttgtcctcaaatttcataaactgacccatctgagttgcagccagatgagcatagcatattggagcaactgcatacatccagttttttcaccaatgagaccctatatatttctataaattgggaacataaaagtgtaaacacaatgctaaaaatgttgtgcaagaacttaccgacagaaatggcagttgtgctcctctgatatctattgtcaaatagcaaaatgattttaagacaatatcgatatatggcaagggttgacataaacaatattataaaacaatcaaatagatcacaactactacttacacatatgataatgaatgcacaagctcctgtagatcatcaggtgaaaagccaatctcgtctaacagaacatggtagtgtgtaggcctgctagtaccctgaatagtaatttttcaaacaaatacaagcatgttattgaagttctgacacaaacatataatttatggaaaactcgtacaaaggggttcctaatctctaaataaacagtattcagtgaaatgaataacgaggatgatcataaaaaataaactaacatgttaaaaaatagaggcatgcaaatgaacatacataaacattaaattaagaaggaaaaatgaacatacataaacattaaattaagaaggaaagaagccagaatccttccacttcaatttgaaaacaatttcaccatgtgaaatgaatgtacatgcgtcttaaagaacatttgtgcactttacatcaacaaaaggataggagccacaataatggaactacaaattgtaaaaccaaaaccacattaaaaaaaatagcagatactcacaatcattccagcatgtgcacacatgtagaaatcataattccgaggatggcaaattttgttatcaattacagttcctgcaaaaataaaaaagagttaagaaataacaaaacaaaaattattgaaacgtgttaaaattcaaaataaacaagatgcataccaggaggaacattgtcaggagctccaggttgaaagaatttagtatgatggttcttttgagcaacaatcaccaaaaacttgggattccacttttcatctaaaaacttgcaagcctaatattaaagaagacaatattaaccccaaaaacacttcaaatatttaaaatttaaattcatcagctcaataaataagcacctcgataatttgatcaagttcaatgttcaaaacttgattgaactgggactcactaacaccatccctacatccagccaaaaaaaggtcagttcaaaatacacaaaaaggtcacttaactaacaaacatacaaattaaaaagattcattatgaaaaaatatgtaagaactaataaaataatagacataaaaaaggccgaagaaaaataaaaaattttaaaaaaatatatacaattcagtacacacatacacatatataacaacatacacattataggtccaacaactgatcatctaacataaaataggtcaggatttgcaaactaaacagaaccatttgttaaatctataagcttttgacatttgtattggtgacataaaaagagatttgcagaacagataacaaggatcgtatcatacaactttatcattcaaaacactaaaaaagaccatcaatcaagtcccttttaaactaatcaaatattacacaaactgccatacatattaaccaccacaatactagataacagactaacaacaatatatatatacacacacacaactcaaaaaaatttataaaaactaaaaataaagtacatatttcacagaataaaatgagaaaaaaaagtaacctgaatatgattatattatcgggctttctattcccagaacttgtatagaaatcaagtagaagctccctgcagatatacaacacaccaatgaccgtccaattccaaaaaatacaaaccacaaaataaacaggtaccacaaaaaactgtttatagtttataaaattgcaactaaactggcattcacttaaattcacttaaatttagaaaccaaattctgatcatttcacataaccaaattcaaaattaatgttaaaaaaaattgagaacaatatgatataataaatatactaggaggattaattcaatgatttgatacaaaattaacttaacctcattatgccttcatcctccttgtcggaaactttcttgaacaaattatcaatcatttccatcttcggagactgcgtacggacgctggccctatactttgatactagaggccattctctagagctgaccacctgcatgtttaagcattagcatataatcagatagtcataaaacattccaataaccaggaagtaggctcaaactaagacaatcataggtttgaaacagatgcccaatataaaaatcacataacaagcactaattaaaataccgcagcaattgaaggaatatctgtttgccctggtgaaccatgagacacatccatgccaataatgatggttggcgctctagaaacaataggaatagaaggagaatgctcaacgcctaacattgagttcagaccaccaagctacaaaacaataaaaaatttaatgacaggtacaacaatgaatcctgacaaactgaacaaaaagcattacactatatattccaaaaaaatagaaaattaaaccaggaaacaacataccttagcattgattttcaacagaacattagtcaaatattggtcattgacccttgtcggagctatacactgagtcacaattccaaaatcagcaagattcttcttcttccatggaccttaccaagttcagttaattttcatcaataaggggacttaaacaattgcatgaaaggagtaaacaaaagacaaaacttatcaaataacttaccataaagatcagaatttttcctctcaggaagcagacaaagaagaaactgaggagccccaggaagtttagactggaccaactcaaacatcttctcaactcgaaccaccggcggtgcacgcctaaactgaccattttcttcaaacacatcaaacggctgatctatcacctaccaattgcagttaagaaaaatatagtcagcaacttattatgcttcagagtcaatctgcagttataaaacttacaatgcctttcattccaccacacttaatgagatccctcacaagtcctcgtacatcacagcgtgcagagaagttaacaacagcccatctttctattttagttggcttgacaattttctggagaaaaaaattcaattattagaaaattcaaatatttttttatgaaattaatacaagagtagaatgacataccttgttattgaagttccacctcccatttctaggattgaagtcctccccattaccaaatttcaactacaaacgaaaatttaataatcagctttaacacaacattgataattaacgaataagatgccatcaacaacaaataaaactacatcttaataatttgacaaacatttccatacaaaaccaactagaattggttacggtagaacatgaagattatattaccaactattcttagacaattaagcaaagcaatatttaaagctacacctctctgagcacaatattaacaaaattaagtcaccaccacaatattcatcaatattcggtaacagtctatttaaatgaagatatagcagacaatacatgataaaaatgaataagcacatgcacaattataatgacttaaaatttacccgtggagcttgtaaaacccgaccctcaacttcagaaaagttggggcttatagagattccacaattgcgtagcattggttcagaaccataattgctacttttaagtgcctgtaacaattaaggtaatatcaggtaaaccagaaaatatacaacccaaatattcaaaactggacaaaaagacacatacatcagacaagaccctcatcctctcctgtggcttctgcctggacttctccaccaatgaagacctttgaagtgtggatagtgcttttgtataacgttgaagtgataccaaacaacacagctaagcataaaaagttaaaaagttattaagcagcaaagaagaatcaatagctttctaattcaaagtcctgaacaaacatataaagcaccaaatctacctcaagagggatgtaagttggcctttttggtttcccaacgttgatacatgggagatccccagaataccgaagatctatcttgcgaatattaacaaaataatcatataccgtcacttcttcctcagtaacatcatcaccttttttcttcaatgtaaacctacaacaccctaaccctgataattaaaaatctctaaaattaataataattaattatcaagaacaaaagcagaattaatgacatacgtttgatctttgcaagggagttcactaagcccagtgattttaaattcttgattagatgggctcgatttaatcctcaggttttttaatgtcctcttggcctgttcaagaaaataaataaaagatgagattattgtatttggcaatcaatcaagtactatgatcaaatggtcattgaattagcttacctttgcccaatcaagtgaaaaggggtctctcacattttgattggatattaggaagtcaaccacaggcccaggggtaattatcatggtggttgagacatctaaacatattgcaagacagaattaataaaaattatgaggaaacaaatgtagtgtccaaggcaaacaacagatcaaacctatgttcaaagacagtccactttgagtagttctaaaactagagtggaagcccctgcaaccaagtacacctcctcctacatcagcaaaattcctgggatcattgtgaaagaacgattgccgcacaagcaaacaccctctgtaaattgacattattttattattttaaattacaacataagagacacacaaaggcaagctgatacaataatgttatcaataataataataatagaagaaaaaagaaatgatcataatccacgcactgcttagcagcatgttgcctcaaaatgatatcaagcactcttattgcttcttgataattctcagattcctgtccacgtagagcattggcaatggcttgcaatggaatctttgaagcatagctaagctcaactttaaatgtcttggatctattagggcgcctcatcctctttttgtcactctcattcagttcttcattgccctctgggctgcagtttccattgtttctataacatacattggtacagaaaaaaaaaagttacaaagctgaaacagtaaaatgttaagtcaaattgaagaattagcatccacagaatttgaacctggtagcaacaacatcctccagaacaaccgtaaactcaagcttgttgcgagcaagagacccgagagtaaacagagtcttctcaccatcatacgcaaaatccttcccattcaattcagaatcatacgtttcatgcaccctgtcgagaagcttcctccctacacccttaccctccacaggtcgtccatcatcataaaaaagagcaacctgttcaaacataaacattgaataaatgattccaagttaaacagagacctgaaataaataatgcaggtgaaaatgaaagcacatacactatactgataaaaatgcccatcagtgtttgcaacgttcactctgtagtgattggtgagcagttgtagctttgtcccttttgaagcaaggccacgcctggctattggaaaccttgaagcctttttcttctccagctcagctttaacaggtaccacatctgatggtacaacgggaggtgggggaggcaacgaatcctcattctcagttccatttggcccgaaagaagccatctactgcatagttcatgcatgaaataaattgtgtcagcataagtagttagttcacatattccttcgaacaaaaaatttgaaaaataactaaatattttgagattgtccacatgcatatctaagcagacgccaacactatggtacaacaaaatttcatacaaaaaaaaaagagacaaaccgctatcatgcaaataaaaccgaaaaataaacatcaatttaagaggggggaaacaaaaacctagagtaatatttattactcaaacaggaagcgtaaaaggcaaacaaacaacaaaatgcgtttatacaaataaacctactgagaaaagaagtttaaaagcaacaaaatactcataaattatctacataaaaactctaatcatgcgaaaaacaatatagtaaaacattttcgctcaacaaaatgaaaaaggaacaactatcataaacagcaaaataatcatagatttacaaggggagaatatagaatctagaacaacatttctaactcaaattgatgaaacaaacaagtaaccagcaaaacgcattttatacaaataaaccaacatagaaataatcacatgcactgcaagcaaaataaaatacacaaaagtgcagtaaacgacatcagcacggaggacgtaaaaagctaaaacaagtaaaatttataaaaaaataaaatacaaataaaaacgaaattaaacaataaatacaactaaacacaaaaaagatactcggaggccaaaatcaggtaccctgaagcaaatatctggcttcggaacacaaatgcccaaaaataagtaggtgtggtcaccgattcggaccatcatcagagcaaacagagttttcgctttcaaaaaaagtaaaagcaaaaaaatatgttacggcgaaatcacaagcagtgaaaaagcacggagtaaactcaaaacactctgaaaaattaattttattaaacttagtgtagccgtcgattcgaaccatcattacaccaaaacagagtgttcgctaaaaaaaaaaaaaaaattaaaaaagcaaaaaaaaaaaaaaaaaacaacgacacagggaaatcacaaccaatgaaaccgctagaattaaactcaaaaaaacactgaagattctaacaaacaagcttctcctcggaagcaaaaacgagcttaaattcaacgaagcacagcgaaagcgtttcctctacaaaataaacatgcaaaaaaagacgatcaaagccgaaacacatgcagcaaaacaaaacattacaaaaaaaaaaacgtaggaaaatgaaagaacataaactacagtgaagcatttcgaaagcagaaaacgctaaaccatcaataggccaggattaaacggtgaaacaagcactgaggacgaaataagcggaagaaaaacgcagaaaatggcaaatgcagcatgtgatcatgacagatagcaacgaaaaaacgaagcaaaattaatgaggtaagaagagtaggcgttttcctcaccagaaaatcagtgacagaagcaagcagcaagcacaaacccaaaccctaagatggcgcagaagaagcagagagaagaaaaatgaatgcaaatgatttgaagcgtgattctatcactcgctcccttcactcttttaatagtggcagcagcgagagtgaatgtgagtgaatgtgcaccggttcgcataatcgcatcctctcattcctctgggggactacgaagagtaaaaataaatgacgcactctgctgtgacgctctatgcagtttgtgctgttccccgctctcggacgtttgatgatgaggtgtggtgtgatgacgtggagggctgagatccgatcacgtttctaggcaaaatttgatgacggtttgggattcggttcgtaaaggtagagcatggtcattacgtttgcactagtgggccccatttccctcagcatttgttactacttttttttttttttttttttttttaataaagagaaacatcgattctttcgataaaatgcctttttgtattcacgttcgtggcatttggtgtggataatgctgggggtgcaaaaataataataattggttatttatcctagaaatcatgttcatttcactagcagcaggtacaattttttactacaacgttatttttttaattttgaaaagatacataaaaattaacaatacataaatatgtttaaaattctaaacaaaatatgcatacgtgattaatttagctataattaaaagtacatactttgtttataattatttggttttaaaattaaataaataaatttaaatcagatatgtcatttttttaaaagttagattcatacgttaactagaataataataataggaaagagacatctattttatatcaaagtaaaatggttaaatttagatataataaatacagatgattaatatttaatgtcacgcatttatgttatgcgaattttaaaaaaaaattatgtaacattttaacattgaatcttaatcctaaatatacaattatactgtttagatttaatcatttaacattcccatataacatgttttttcttgtaagatgtatcatattattttaagaatatttttaaaaattattggtgaaacaacaccatattataaaaaaataaaaaataccatattataatgaatattggtaaaataaatttgaatattgattaaatgttttaggaaattaaaaaaaaatttctaatatgtaactaattaaggaaaatagtattgatttgatgtggaaatattatagatttgattcactcttatagtataaatttcgatcttgctttgaaattaaagtatttattttttggaagttattatatttctcactaagccagttgacattttatatattaagcatttaattcattttgaatttgaattctaatttgaattaaatttaaagttaagatatttaatcctaatgtactatattaaaatgcagatacatttgtttttgaatcttaattaaaactgaatttgctaatatcgtatacaatcttaacaaatcctaattaaattaaatttatttgttttaaatattaaaagaaaatatcatatcaacaaaggtataatattgttaatattcttaggatgacccgagtgaaattatacttggtcccttaaataaagttggtcaaacaatacttttaaataggtttaacttgtttaaaaaaaatgttgagtttgacatgttaggctttatcttcagatttactttagatcatttaaagacaatcattacttatacctctcaacttaactaaaatactttacttgaaattttcacacttttagaagtgaaaaatattcaacattccaaaaaatactttttgaagtgaaattgttgaaattttaacgagaaatatctttcaatttttagaaaaaaaaataaagaagcaattgcctttaagttgcttcgtatttgttatgtgttaatatattcagttgatcagttttaaaaaaatattatgagattttgtaagttgttgcttcacgatagtaatatttacgaaatcaaacgcatcccttgtggaagaatgacaaattattactcagcaacaccatacatttgtactgagatatcaatgggttggtctgatgggccttaaaagttgccgaaagccttttttattttatttttaaataggcctatataaatacacttcaaagactcaacatacttaatttgaagagttctacttcttacatcagcgctttttctaatacacccagcatgtacaatataataccaattttacccttctcataattcgaaaggcaatgggtgtatgaatccgtaaaggttcatacggattcgtaatccataagaaccttacgaattcgtaattcgtaagacgaaacgattttgtagaaatctcacagatttgtaatccgtaagagtaaatccataaaactcgtacggattcataatccgtatgacttaaaattttttaaaatgatttttgaaataatggtctagataagtgtcgaacccgtaaccttcgattacgagcattgtgctctaaccaactaagctactagaccatccatgttagaaactaattaaaattgctatatataacattacaaattttaatgtatatttaatacacataaatttacataattaatttttatctaataatatttttttacatatataaatttctattgtatatgaacctatgattttataaaattaaaatttgtaatatatatgaatctaatatttttttattcaaatctataatttttaattaagccatgatttttattttaatttattattctcaaaattcatatattttataattaaatcatgattttatctaataatatattttttatccaataaaatatattttttaaaaattaattgttataaaaaatatattttataattaaaccatgattttatctaataatatattttttatctaataaaatattttttctaaaattaatttataaaaaatatattttataattaaaccatgattttataaaactgaattcatagaagtcatgtgtatatttatcattttcaagtaataactaataaatatatttatgattttctttaaaagtaaaaaagaaaattataactttaaagttaaaaaaattacaataaaatcttaaaatcttttacgatttcaatttaaaaataaaaaaaaaaagttgtgatagaagttattacttataactcaaaaatagtaacacatgttacaacttatatacttttggtaaaaaatttaaaatccaccccaaacaaataattaaaaaaaatcacctatttgtggtcaaatccccgatttgaaaccaacttctcagagatgaaaaaatcgtcacagattaaattagaagtatcaactaacttagtctttatttactataattacttaatagagacattttttttgataatttaatagatacactttataatctatattaataatacaaaaaatctgtcatttgatttacatacattattagacaattttagtatgaaataactttcatattcttcatctaaacaagaacaactgctgctacttttatgttgtttcactttttttattaactttatttaacttctgatatatttttttaattatttaaaatgtttagagagacacgtatcaaatatgaaaaaatcatatttccaaggttacaatatacaaaataattttgtaaagaagttagcctttaattttattttataaaatctaatattaactagttttatatggttatttagattattttttctttatactccatcagataccgtttttaacaattttcaattacttgaagtgatttgtatgtttctgacataatgaatagttgttacacagtattctatttttatagacttaagcaatatttcatctgagatagaaagatgaggatatccttcatattaataaaaagaggattataagataaatggatccgttgacaaaagtgaggatgtaacaccacagccataaaataattaaaccaatttggattctcccaaccactttaggtggtgtcagtaatggtggttgcacaaacttagcattatcacacaaaatacgccacttaccaaaatgtactcgactttgcacatacttaccactatcacacacaatatgccacttaccaaataaactccacttttcttccgatttatttttcacatctgttttgtttttaatctccctattaaggaattcatcacttattgtttcaaacaataagtgtttagttttttcaaccataggtttaaaattatatctgatcatggaattgagttgaaataatagtcgaaaataataattaatttttgttagagatagtaaacacaaataaaataataatttattttatatttaaggattaataaaaaatggaccctaaacttttacttttttttttccagaatattgttgttgttggtaattttaaacacttcccttttaactgttttatgattcaattttttttttaactttatgattcgactatttaaaaacaaaggaagataaaataaagtaattttgtttattaataaaaataataattactattttagtatatctgtgatctttaatgtatttatatataaaatataaaattaattgtataaatgtattagagaatcacatttccatttttctttctctaaagatgtgtctaggactatttgacagtattttgagtggaattatttttaataaatacatgcaaaatattaatttatgaaaatgtagtagttctttatattaaaattactaattcactatttctcaaaattattttattctcttaaaaaaaatcaatcaaaaataattttggattaattgaagatataaaaactcatttgaaaaactaaatattttatttatttcaaaataacattcgtcctaaattattttatatagattaaaatattatataaataaaagaatattaatttaataaaattaattttatattacaattaatttatttacaatttttattatttattattaatattataagagatgtaaataataaaaaaatataattaattaatgttaaggaatatatatttttttttttttatatataacaattataatggaaggaagattataaaaatgaagcaagggcgagcatgccatgttttactgctatgtgttattcccaaagccgatacttccttttcaagtcttttctctctctctctctctctctctccatataagattcttccctctcccttgtctctctctctctctctctctagaacttcctcctccctctgcttctttctttcttcgttgctgcgcgattgctgcatcctcctccaataagagctcactgctagtgaaccctaacacggcggcaacgagaggtgttcggttgaagctcagatcagcgatggcagtagcaacccgcacttctctgcggttcctcctctccgtctccgtaaccctaactctcgctcacctcgccacctcaaattccgaaggcgacgctctctacacgctgaaacggagcctctcggaccctgacaacgtcctccagagctgggatcccactctcgttagcccctgtacttggttccacgtcacctgcaaccaggacaaccgagtcactcgagtgtatgtatcctctctctctctctctctctgtgtgtgttttgttgcttgcttaattgttactatatgttactttaatttatttatactactgctatcagttttattattatgcggtgcttgctgattttagatttttaacgaggtttgttattctgttaattggttatgaaattgaagggtcctccgcgaggttgcgggaatcgtcaaattatacatgccattaaaagttgtctttagatactttcttatgttctccatcactgggattcttttttatgtattttaaaattagatgtttgattttctggacgggggattattgttgcttatgatacgatacattgatacgatatgtgtatagatacatagagtaaatagtcatatatggaaattttgttgacttttaaaataattaccataaaagttatgccaacaatgatttttgatcgattgacaatacatagaaattgaaattcaactcatgcaattatttttaaaaatatgtaggatgtaatatgtgtgagatgcatatctagatatgcataaacaatttaaaatatgcaagtgaaattcacgtttctgtattacactgtatacaggcttctatcagttctatgtctcatatatagctatattagattttcatttctttttttaaaggcctggatacttcatagttcacatatttgtattggtgaattatctaagtattggatccggaaatgtatcagataggataaaaaactacgtaccctattgtccataggcttcccgatgcaaagataagggggagggatattgtacgcaactttacccttgcatatgcaaatagactgtttccagattcgaatccatgaccaactagtcaccaaggcacaactttaccgctgtgccaggcctcgctgaaatgctaactaaaatgtgttgaattgactgaatctgttaatattctctccatgtttatggtaattatggtgctttctacagggatcttggtaactctaacctatctggacatttggtacctgaacttgggaagctggagcatctacagtatctgtatgttttctaactttgctttacatttttttccagatattgtgactttttaagtctgttaaatgtgcccttatgatgcattgacacaatacatgtatcagatatggtacgataatgcggttatcctaaaaatgtatcagatatggtacgttaagatacttatgaacaaaataaaaattgtaaaccattgtcatcataaatcactttctgttgtcaaataggaataaagaggactttaagtttgttatttatgcccttatgatgcataggtacaatgcatgtatcaaatacaaaacatatctgatacggcgatacaattagtaaatatctgatacataaaatatatcagatacaatatgtgaaagatgaatatctagaatggtagatatgtataaaaattcatagaacataataaacatctgatgtatgtggacctccatcaacatctgatacataaaatatatcagatacaatatgtgaaagatgaatatctagaattgtagatatgtataaaaattcataaaacataataaacatataattgcaaatccaaattaagaacacacttcttggacattacaatgaataaaataaaaactataaagcattgtcatcataaatcactttctattgtctataagtaggaataatatcaatctcattcctctcttgagatcatccataaagaggacaatttcattttttgcttcattaagggacaatgcttctatgtttctatattatgtttgaagtttgatatgtagctatattagattatattttcatgactttttttaaaaggcttggatacttcatagatatgtgttggtgaagtatccaagagtattggttttggatatgtatcgtatacgtaaaacaaatgaaagtataagacagtgtttcatattgtgctcatattattactaaaatgattgatttattggtatttgctgtggctctcttattgttgtgaactatcgaattttatacttgttagtgtttaatgtggttttcctttcattggatgtagtgagttgtacaaaaacaacattcaaggaactattcctccggaacttggaaacctgaagagtctagttagcttggacttgtacaacaacaacatatcaggcaccatcccaccttcattggggaaattgaagaatcttgtctttttgtaagtatgtttaataacatattaagcttgactggacagatctgtggcatttgctttcccttctttcatttgaatttcttgcaagactttgaatgatgcaggcaaagtacaagaacttttgcatagcaacttattgacattggtgtttttcagttatacattttatattaagtttgggcatggacaattttgggttttgtgcttggtgttaagatgtggactgtagggcatatatttatgttaagacagatgaattatgacagtagatatgaaatgaattgctttcaaaattcacattctcaaacctaaatataaacctcattcataggaggaaatatcaacaatgttttagttcaaaggaaataaaataatttactatcatatccttaaaataatagaccaatgaagccattaagtaaagcataatttagtccaatcagtgtgaaaaatttctccccttaaatccccccaaccattattgagtgaaagagtgattctactattctagtatgactcattttgattaaattgagatgacttcagtcccgacattcagtggtatgattcaatctaaacaaactaagtaacttaaaagttctatctaaacatttcaatggaccatgtctaagcacaattcaatatccttcacaaatcaaacctctagtcagtgaatgacccatagaaagctatttactttttttaggtggtaaaatacttcaacctagcttttttttagctttcacagagtctgaaatttattcagccaaacctggaagctaagtgacaatttaaaataacattaataaatattaatctgagttagtaatcccattttgaagtgttggaagctgttagtgtttcaatatgatatggtgtaacttacaagtttcttaactggtgagacttttgattattattttgtggaataaatattcagcactttcatgattctctcaactgtgttttctttgcagacgactcaatgacaaccgactaactggcccaatccccaaggaacttgctgctgtttcaagccttaaagtagtgtaagtaacaatcttgtctttatatgttgatcatgataacattaggtaacttgaagatttatgctttcaaagagcctaaacattcactttattttcagggatgtctccaacaatgatttatgtggtacaattcctacctccgggccattcgagcatattccattgaataagtaatttcttcttaactctaagcatgtagcttttttcttattctccatgtggtgctattcatgttggctttcactcgagtcttattttcttctcttctgcacctttttttaatattgttccttccttttctttttcttttttgttggggccttgggggaggtaagggggtaacaatgagaaatttagtaaccttctctgctaaatgctgctatatcacccttgcaatttttattgctcaatggttaagatgttgtgggtgtcctgttcacatcacccttgcaatttttattgcttaatggttaagatgttgtgcttgtcctgttcacatcatatttatggaggtcctgttaaattgtgatgataatatttgattgttattcgttgttgtgtgtgatgatgacacaaagtgtatatgataggcaatttccaattgtttcatgggatagtaggaattgacacagcttttgggaggcttccctgttacaatgtatttgtgatgacagggaatttgattgcattttattgtcctatacagttaattatagttggtcttcctgcatttttctggtgcactgattctgtaatcatttaaattttgccttctagattttagcttgaaaatattttctgctatctggttatctttcttctttcctgttacttgttgaataagcgttgttttgtttcaatgatgtagctttgagaataatcctcgtttggaaggtccagagttgttgggacttgtaagttatgatacaaactgctcgtgaataacgtgatgtggtaggatctcaatctgcgttgaattatatatatgtattctaaaatttaagtgttacctcatagtgtaatgggcagtggtaaatgtaatctctggtatatgtaaatttacatactaagggcattggaatttgtaacaatattatgatctgacaatgatgttgagacttgaatatctattgatgaaatactagggggaaaaaatcgacttggtcactgataaaatatgtgtgacgtattgctctctattctatgttattttgtttctttgtcaatgacaatgcatgtgtttatcgtcgtggtattcacttcacatatgtaacttttgcttggtgtaactgaatatcgtgtgcaaggagacaaattctttaaagatggtttatccctcgtgaattgacgggtaacaaactggttcaagttattttttttatccgtaataaccaaagacaaattaggagatttataataatttttgcatctttattcaatcaactgaacttaatcctcttgaattttgctttaacaaattggttcaagttattaggaatatatatcttgttcaatttaaaaggtgcacttatcaagcaaaggatgcaatgaaaatggcaaacaagacccacagataggagttttgtgttaccttttgatggttcgagttaaccactcagaattttaaatatcattttaaacaacactggaggtgtaataattaattttgggggaatggtttactggttttcaaatgaattggtcttaccttctgaatgtattgttggcttcaattggcaattaactacggaacaaataagctcattttttttactagactatttgtattgtctttttcaaacaactcaccattagagtactcgatgttataattcgtcgtcggaaaatttggagcatttgatgttctatttatatcatgcttgaatcaatcacgtcattaaagaaacgcagtggttttaagacataattgcatcatctcccttgttaactaaaaaagagccccatattttacttggttatgaattggttaaattgaagataaatgttaaccagtgtattgattaagaagcataaaatataaatgtttttgttgtgagatggaaaaatgtactatcaatgatcttttttatgttttcttataaattatataataaatatttttttttcttaattaatgttctaagaatactggttaacaagaccttaaattaaaaatgtcaattttttcgatccttctttttattcattgttcttctcacttatttttcatttttgtcaaatgtatgctcggatactttatttatttataaatcatgttggtattgtagcattcagaatcgtctcacttcaaagaactagagacaagacgttatgaacgcttcaaatagaactagtttcacatgagcacaacgaaacttcaatgtgaatcaaacaattgtaggatggaatgctgaatttttaattatacaattctagacgtgattcaatctatgtttacaagttaaagaaaactaatttctatacttttgcagatttttattcaattacaataatttataattgagcacatatttaaaatagtttaatttgataaaaaaaaagagagtaaagaaatgcatttcagagaaattttgttatttaaataaaatagaagtataaattgtaatttacgcacttacatcaatgtcaggatggccgagtggtctaaggcgccagactcaagttctggtcctcgtgagagggcgtgggttcaaatcccacttctgacacttttgtcatatttttttgtctcctcttttacgtttttaagtcattcctgttaatataatttggcgatagttccagcaataataaatatgcatcacaaattcacaatcataatctgacaacatgaattccatcatatgttaatttaggctgaaatgataactcgactacaagagattaatcttcaactggtgataaatgaccaatggacatggaccattttttgggtatatgttgttatgctgactttgtatagtattttgaataatattaatacaatactcttttccttccaaaaagctatgaaatttacatgtgctgctacataattataaagtgtaatgactaggtacataagtgtaataacactgttaattagtaataaaaaaaaatgtaatgactaggtacataagcgtaaaaacactgttagttagtaataaaaaaacctgctgatatatgatttttatagtaattattaaaattaacaaatttatcttataggataatgtttgtaattaaataatgatgtaagtgtataatctggcccaacttttttagttattgttgaagttaggctaagcttttaattgcattataatattaatacttttgaaaatttgttttggaatagaataaaacagcaatttcatttctaaagtattattttattttttggttgcaattataaagtatattctctcatatagattatatttgattagatattttagttattttttagtttttttattgattaaaatttttgtttaactgatcgataaataagttttttttagtagattttattattctttaaaatgttacttaatttaatgttttttaaaatattacttaatttaactttttcaaaatgataacctctagtttttagttttttttaatatttttttcatttttatctttaatatatttatttaattttctagttatcctttttaaataaatcataattttttttattttacactttttagttacttcaacaactaatcttattgaataccaactaattttaccaaatataaccatactctcgaaataaataaaatacataaataatatttcatgctaccaaaaaaaatagaaataatcttttaagtattataaatcatattatacaacccgtcaagtattgaaaaatctttcaaattatgttctgaatgttagtaaaatatatcactgcataaactaaattaatgaaagaattatctatataattttattactgtaaagaccatttagaagctgagaaagtaatacttgagagaacaaattgatagtttactcttatgaaatatatataatatattttagaaactaaattatcgaatatctgccaattagttttctcccttcttaatttgaaacaagtatattgtgtttggttaatagcttttcattaaagctactatttgtagattctgcatattttttttctggtttatgactcgatgcacatattttacgtatatccaaatatttctaatttttaagcttgaagagagaaattttattctctttaactcttcatctgtatttctataagtggtggaatattgtgaagttagtaaagaaagatgattatactatataaaaattgataataaaaaataatttgtgaaaaataattaaaaataaacatattactcaagaagcaatcttcaattgagaaaaaaaaaaaacacaaaaaagaattgatctttaattgttccctccatcgaaattttctttgaacctctgccattgttccatcatgtacaaactttatgcagacaaactcacaaacgtgcatttaatcagtaatcactttagcttgattgtgggcctaagtcttactttatattgccaatacaacaagcagtaccagacacaaactgggctgaaaactaccatttttgacaaaaaaacaaaaaaacaaaaaccaaaatggccattgtagtgggtccgtaggtagaaaataacgattgcaattggacccagagcgataaataaaaaacaattttatacaaaatggccacaagtagccaagaaaaattatttcacatacaaaagacgtgggtaattaactaactttattttaaaatatatatttttatatcaattttaagatttttaaataataatctcgaaactaaacatgcatttaacgtcctaaacacttattacccaaagatgttatttccttgttaatttaacgttaccatagtttttctgtaaagtgtatatttgctttagtgtcacgtcagactcattttagatgtgtattattataacttgggtgttattttaggtaatctttaatggaagatgtttgatgagtgagacaaaagcacacatacgcaagaagttggcctctcctccaagcaattcagaatttcaaatgggttaacgaacctcaattaaattaaacaaaacatacatcgtgtaattcttctctcttaaggcatatagtgaaagggcatatcatatgcttgcttgatgtaccaatctccctcatgtgatttaagtatataaaaatagaaaatgaaatatcttgcacgtatggatccaaatttaaaattaaagtaaaattaattctttcactctgttgtctttaaaagacctttggtaccgttaatgtttgtgcttacatgatatgttattttccttatgtgcaattgatggtgcacacgttgataatatttgccaaaaatatgtcaaaaaatacatcatgtttttatatatattctttatcatactatttaacccatcacatgtttttttttttcttttttttgtgtttatctctttacccttttgtataaaatattataaaattaacatttgtctaagagatagttttagattaattcaagaataaaaacaaaaatttataacgcaaaagttgaaaaataccacattgcaacgtgttgaatgtgataaattaagtctacctctctataatgtattgcctcatttctctatatatacaaacccactcgcaagggcctataatgccacaacccacattgtggatcaacagcttctaataaatccttgacaacttcctccacttctaattcaattcaggctctagctatgagcaaaagcaataacaatataatgagctttaaagctataaccttatggtgcattttgttgtctttgttgcaactatcactaggagctgtaatgcaccgcattaggtttaatgtagagtacatgtatcgtgagccagattgccatgagcacgttgtgatgggaatcaatggccagtttcctggcccaaccatcacagctgaagctggagacacccttgagattctactcaccaataagctctccacagagggaacagttattcactggcatggaattagacaggttttatatatatacttttttgtccctttctttctctgtctagacatacatatagaaatatatatgatcgaatattaaacttgtacacttttttggggtgtattgtgtatgttgcagtatggaacaccttgggctgatggaactgctgccatttcacagtgtgctattgctcctggagaaacttttaattacacatttacagttgacagggtatatgcatactaattaaattacgtttatctctttattttgtttcgtgtgctagctataaatacttatcccttaaaaaaaaagctataagtaattatggcatatgttacattatctttattttgaaatattaattttagttcctataattagtccctataattatcaaaaagtgatatgattttaattagtcttaaattaggaactaaaaatatgtgtttttggataaaagtagaggccgaaaacctattaaatttctatatggactaaaattaaacgtggtgcaggcgggtacatatttctatcatggacactttggtatgcaaagagcagcaggactgtatggttctctgatagtgaatttgccaaagggaaaaaaggagccattccattatgatggtgagttcaaccttttgctgagtgattggtggcacaaaagcacacattctcaagaggttggtctctcctccatgccattcagatggattaacgaacctcaggtaaatcgaatatactccaacaccctgaactttttttatattttttataattacacacgatattactctttttctagctatttctgtattaacccctttaaatgtttgaaaaaatattatactgacaattattacactaacattcatgtaagaaaagctgttgtaaacgttaaaaaatgagaagtattgtgtgtaatacgaaaaaatctaaagaggtgtggtgtgtcattgtaatttgttttttttctttctcttcattatcttatatctgaattaacagtgaaatagagaagaaatgcattagaagaaaataaatagaaatgataaaataaaagagaaataaagtgaaaaatattttgttcggatgaaaagaaatagtatttttatattatttttgttttcttctctcatgttgttatgtgaataaataaacataggattattaatgatgtataaggacatatcatatgtcagcttatctcccacttgtgatgtaagaatataaaaatggataatgaaatatcttgaacgtatggatccaaattcattgcagatcaaaatctaacctcgaaacgaattagaaacacatgtattgtccttctccctgctgagcaaataggaaaaaagaaaacatatatggactgttcatatctcccgctagtggaaagtgggcatatattggatttttgtgcaaacaagtcttctccttagctaaatcaacatattcaattttcaaccagaaattcatttactttgtaagtaattaaggaatttccaataagaagacgattagattttaacactaatgttcacgataatctttattttatgcatggctatatgtcttttttttttttataaacaataaatccattgccaaatcagcttttcaagatactatagaggtcccaagatttttatataataaaataaagctagctcttagtatttctgaaagaaaaaagatatataaattatactatcttatagaagaaacatgggatacgcccattcgattttgtctaatagcccggtcacaaaatttaatatttatatataagaatttgattagaatttagaaatagtatacatattttttatattattgtttaactaagaattctcatgtttagtaagatggttaagttttataataattatttcaaaaatcatacacaagtgatttctcgttggcaaacattgtaaatcattttatattcacaatgtatcaaaatttttttttttacaggaccaaaattaaattctttataatacaagagtgttaaatatacatcatatctagaaaagtatcatgtatttgatccatttctgtattcaaaagaaattatagtcaaaatctcgttaatattactattgaattttttaaaaaaactaactcaataaaaaaacatgaatctctaaacaattgaagaagaagaagaagaatataaaatgtaaactaatatttataagtagagcgatttttgtaagcccttaaaagactgtttcagttttccgttttccctttcctattgtgaccaatttttttttttttttaaatgattgtaattatttcattgttacttgcaaatattattcagagtttttaattataaccattataccgattttttttttcgagagatacaatgtcgttaagagtgataatatcttcacttgttcctaccaacaatatggttcaagtgactaggggctaagactaaagcacatggtcgaataatgtttgatgtgtataaaaaacattttaggaagaagacaataaacttatgagtgtcactagaatttttagaaaaatttaaaaatcttgatgatcgacagtgatactcatttgcaatcacatacataaaaaaaatattcattttttccacttaattatcttttaatatttaattcactccataaattaacaaggtgagaatagctctagaagtagaagtagtaaccaaagaaagtcaactacactacttcctttagttattgttgtacctatgcaagattccagccaatagatatttgaatggaaagaattttcttacctttcaaacatttaactttttcagtctttgcttattaatgggagaggacaatacaattgttccttggcagctaatcttattaagacctccttgccccaatgcaagttcagaggtaacgaacaatgtgcacctcagattctccatgtcgatccaaacaagacctacaggatcaggattgctagtaccacttccttggcatctctcaacttggccattggggtaagtttattatcatatgtatattttatttcatgaaatttatattggtagtagcatgcatcatgctagttttatattttatgttttggatagcaactagtcttatattttaactatttttaatattgttagcaataataaaaaatactagtaatttgaatactttttattaccaattccatagaaaactttttatttttagtttcttaaccaagttagcatttgcctattaatatcaagacaaactctatatataaacctgcatgcgacgcatatgtccatgaaaaatgtcagagtaggctaactttaataacccgagttccatacagcatcttatcttgaatatgcaaaaaaaaaaaatgtttatgtattatgtagtataatatataatataattatttataaaagcaactaaaaatgtgagttttatatatttttttattcttttctacacaatctgatggtaagtaaaaggagatgaaagatgccaacttaatgaaattaaaataaggaattttattatttaaattaaatatgaaataattaatattgtatttgatattatatataatttttttattatatatataaatctaaaaaatctactagtttattatttatatttatatatatatatatatataaaagaaagttttattctataggataatgtcatgtaacatctcatattcattccctccaaataatttaataattcaattaatatagatttatatttattttattctatttgcaatagaatcttaaattaattagaaaatttaaatcaattatagtacttaaaaactgtataaattatatttttacatatctactaacacaccattattaaaatttaaactaaataattaataatatattaaaagttaaataatataaaaattattcttataaattataaaatataaatttaatactcggagaactaaactagtattttttttaaaccaataatttattttcgatgactaggaaaaataaaaaaaatgttgcaaaacaatatttccataaaatatgatagagatgtcactgccgctgtactctgtagattggtcgtgaacgtgaaagagaagacaaaaggtagctcttgtcatttttaatccctggctcaggcccagaccccatacttttgggcacatggttgcagggattaacctttggattcttcagttttgggacttgggaggaactataaaacttcatcacttaataataaaaaagtatctttattcatatttttttccctcaatttttcttcttcttttcaaacactacacaaagttcaacttttgttgattgcacgacgatcggggaaaaagaaaaagaaaaaataaaattgtacaagcctacgaggacttagtttctgttaaaattaaagtttatactaaaggttttatatatgccatgcacaccgtatagttgaggaggctataataccacgttaaatttttttttttcaaaacattaagaaattagttattaatatttttttaaaaaaactcaagagatactattatctattaatcatatcacactattaataactttaagttattatgttaaatgggtaaaatctgtaaaaaaatatattaaatgggtaaaaggttttatatatctggcataactttttttctgttatcgaaaaatcgaaatgcctaatatctttggatttcatccatttttttaatctttaatttaatattgaagttttggtgagaaaacagagataaccaaattctttgtgttagtatgtagaattgaaattgatactagtatcatttagacagttggttacctagctatgcatttgcactttacgtcatgattgaattatacttagtaatccataatcttttgtaaaaactctacttcaatatgtatatgtgcagttgtatatacgtaattagtttcagcatgaagaatgttgacatgtgttgcatgcttttaacttctttgtgcttatagaatcacaaattggtggtggtggaagctgatggaaactatgtgaaaccatttatcgttgatgacatagacatatattctggtgaaagttactcggttctccttacaacaaatcaagacccaaagaaaaactattggatttcagttggtgttagaggaagaccacccaacaccccacaaggtttaactatcctaaactacaaaacaatctctgcctcagtttttcccacttcttcaccacccatcacacctcaatgggatgattataatcgtagcaaggcattcacttacaaaattcttgccctaaagggaacggaacaacctcctcaacactatgatcgtaggcttttccttctcaacacacaaaaccttgttgatggatacactaaatgggccattaacaatgtctcactagcattgccaacaactccttacctaggctccattaggtttaatgtgaatggtgcctttgacccaaaaagtccacctgacaatttctcaatggattatgacatcttgaaacctcccttgaaccctaatgcaaacattggaagtggggtttacatgtttcagtttaaccaagttgttgatgtgatactccaaaatgctaatgtaatgaagggcaaaaacagtgagattcacccttggcatttgcatgggcatgacttttggattttagggtatggagatgggaaattcaaacaaggtgacgagtccaaattcaacttaaagaacccaccattgaggaacactgcagtgatattcccttatggttggactgctttgaggtttaaggcagataatcctggagtttgggccttccattgccatattgagcctcatttgcacatgggaatgggtgtcatttttgctgaggctgttcaaaacgtgaagagtatacctagggatgcttttgcatgtggcattctcaagatgttcatgaatgaggaacacaactgaaactagcagatagccacacatgtgtttacccttagtttgtttagtttaactttctttcttgtcttcttcccttcattgttttgtttctgtagtcttgctgtgcttttattgtgtgttagctaggcatgctgactacctcatgtaaggtagtcgtgccttgttctactaaaaaaattatggtaagcatgccaaagaatgtgaccgagttctgctgcttttactaggcaatatagtataccatttaaaactttaaatgagatcatcagatgcatattatgttcaataaataatcatagagtgagaaacaattgaacacaaacaagttttcaatacacatcaacaacatttttaatccaagttaattgagttccatgatagatgaacccaataatatatatgaggaggttgaaaaaaaaagaaggtaaaaacaaagaaagaaaaaagaagaaaagagagatgaagagaaaaaaaaaattaaaaatgaactatataaaatatagagataataacagatctaatcatctactaaatttataacttttctcattctctttgaaaacacaacaaacaagttttcaatctcaataaaataataaccaagatttattcaccagttatagcccaaatatgagttaatatgcatattgtagctctattaaaaaacaactaataaaaccatttattatagttttttttaatgatttttctatagaacaaattttcacccgcatgaaaactttgtgctgcctatgtaacataatttcaatcctcaatgatgctcttacttggtggcttgagcgattatattactcaatgagctggcttcctctttggcagtttccactaaatcctcctgtaactcattatcataagatcagaattttgtaaaacacaagattaattataaaatatgaggataaaattaagatgcaattcctttgttgtttttactgctattctttaactacaattagactttcactttagtaacttatgttgagttttagtgtacatcctaatgtaaatgatcaaaatcagattctattgtgattaaagactaccagaaaaaagtactgagagcattacatccaaattttgtccaaaatatgatagttatggtaaactaggagtggaaaatgtaataagaaaaattacctgtgcacttatcaatctcagagtagttctcttgctagtctcctgcatggctccagccaataaaatttcatccaatataaaatatgcctgccaagatcaagcacaattttaatcacggatgaagataaacaccaaatagtacatagtagttttcttttctttcattaaatcattagcattcttacttatatatgactttcaaatttatattaaaaataagaaaatatgattgatcacaacgaagactgcaatcaaacctgcaaggatcctagtcttatttaccgtataaactatataatgtaacatgatattagattatctgatttttttgaggggtatccaatattgttgaactgtgtgcattattagaaagaatacagtctgagagaaaatgaattaccttatgaaaattaaagattaaatccagctcacaaacctggtaatagaagtaagagaaacaaactcaggatctgaagtacgtgtgcaaattattaataactttagaattcaacaatttacgatactaacactgccaaaataacgatccaatgtctcaacatagtgatgaataatggccaaggtctccaattcattgtcttcgtgatcattgcaaatgcaaaagtataggctagcatatctaaacaataaccaaaatgaagagtctgaaaattattatagtttagtgtattttgttagccatgcatcagctgagggaacaatgaagggaagggatcaatcttgacccaccttttataaacaactttgaatcccctccactccacgaagttgcacagcttaggggctcgagagataattaccccagttaactcacgaattaccttccataaaataaagacaaaaagcataaatagaattaaaaaaaataaaaaattaagcgatgttgtatacccaaaagacatcaataagcaaaatccatttcataggacaattaaccgctataagaatatgatccagtgcatatatttaacagaacatgcataaacattaacaattgatataacatgaaatatgcctaaaaatatcaaacaagggtcactcataataaaatatcattataaatgtagaaggattgaagccttgtcataatttagattcatacttatagctcatattcaacatgcaattttggtgataaaaccatattgaatactttcagatccaatgatttgtgcaattctaactaccatgatctaacacattgggtcaaaatagattaaaccatttacattttatattgaattagaggtaagtaccttggatctctccttttgagagtatggtgaataccattttgcgagccttacttttccttgtcgactgatgagaagcacaaagtgaatctgtaaccaaaaagaattattattatttttaaatctctaaattataatatagatgtacgcatacacatgatttatataatttcaaatcaaacccatcttctcaagaatgagttgtggatgatattaagccaacaccataaatagtgacatcaaacactgcacaaaacgaggttaggttcatcgaaaggaatcacgtaattttctacaaatacgtaacatgaatttcacttattgaaagaaaaagatgaattgcagtgaattgaaaaatatttaaaaactgatacaacgagaagaaaaaacatttaccattgatggtcgatatgggatttgagaagaccacaaatgaaactctttaagattgttgtttttcacttttcagaaaggaataaaagtatttcaagttatgatgcgttaaatatcaaaatcatatatgctattaaatatgagccttattaattgttgaggttaaggtcaaagttaaacatttaattagtgtcacacaaattaatgtgtatttgactgttttcttttaaaaaagaaataaactttgaaatatggatttgttatatatacacaaaattaatttgttagttagaagtaccatacatgcctaataattcacaaaataaataaaaaataaaatacttgcctaaccattgttttatgtgttaggatatttttttgtatatgaaaaccttttcctggtttctcctaaatgttgttatacctttgtaaacacaatgtaagagtttttttttttttttttttttttttttgtgaatacaatgttagagatcaggatcacacaatcttgcatattataagatgatgattgatgcattaaacaagatagtacataaaatttaccgatattatattgacgtgtactaaacttgtcacctaaatagttggctggcaagatatgctaccactctttttatttaagttttcatttaggatgaataagattaaagaataagatgattaataaatactatattttttttttcatttggttgatgaactcttatagactcatacaatcagtggcccaaatttagataaaattttggaggtcaatgtcattaagatgataacatataatttaaatgcaatttttttataatatattctcttaagcatttgatattttttaaatattaattatgttaattaaatatttttatattagaatatttttctactttattaaccatgttgctcaggtttcctttttttttttttataggaattttacacccatatctaaatttcatctttagaatagaataattaattagtgacacaagtgattttataggtggtacatgcaagagatcttatatatcctaaatataggattttcaattttatctttggcattaaaacttctaaataaaatgtgacgagtattaaaaatcgtcatattgtttcaaaacttatgagactctgattaataaaactcatggaccatctaagtgttatatataggatttcaaaacttataatcctatttttattgaagaaacgtcatcttataatcctatctagtaaataccatctttctatctcaaatgtaaattggtaatgacacatttctacgtccaaatctatatatcttaaatctatgtgttctttctaaagttgcctcttgtgcaggtcatccaagtaaggatgtcccattgctttctttgcagaaatcctcttgcaaggttcatatttcaacgttttctgaaaagaaaaagagagaaaaatataatgaaatgaaaatgaacagtaggcactaaaataaaaagaattagctaaggagcaacttaaacttaacaaatagaagatccagtcaagttggaacaatcattgagagactttgaggattccattggggctactcatgcaagttccttggtttactcactcctagccacacctcttcattaggagtacccaatagcctgcacaaacaagactattaaattagaattatatatacataatgaagctaattaagaaagtgacacacacatatatctaattgttaaacgaaagcggtctaagaataaaacaattaaaatttaaaatttaggttttcaacaaaaaaaataaattactattaatttttataacacaaaaaagattacatatatattaacaaaaaggactaacataatttaaaaaaattatcttaaaaattactttaggcttcaataaccattgagtcagctctttgttttaaatcataaacctcttaaaaccctatacctgaatatatgaaggagttgtcgctagggatgaaaataggccaggtcgcctatcaggggcttttggcctggcctgacttgtttattataaaggataggcttaagcttttgaaaagcctatttaaataaaaaggctgggcttaagctttaaaaaaagcctattaggcctatcaggctggcctatatatatatatatatatatatatatatatatatatatagatattaaaattaaaaagatataaatcaatcttttaaaaaaagaaataaaataagataagataaaatctaaatagcttatcttacttaaaagataaaaaataaaataggaaatttgaaatctttgtagtaggtttgtaaaaaagccaatatatatatatatatatatatataaactaaaaaaatataaatcaatctttaaaaaaagaaataaaataagataagatacctaatctcatattagagtgctctaattaattttatttttttcacgcacaaattaaaagggaagtatgtcaatatgtgtctttctttatattaaattctaaaaaatattatgcgaattctcaaagtttcactaatatataatatttattgtaaaatagactttttaataggctcgtaggccaagccagacttttaaataggtcaggccaagcctaaaaaaaaagcctataacaggtaaataggctaggccagacttgatgtttttaaataagaccaaggtcaggcttagtggcctaaaaaaaagcctataacaggtaaataggctaggccagacttgatgtttttaaataaggtcaaggctaggcctaactaagcctgacctagcctgacttgtttccacccctagttgtcgcagctcggaatcacctagaaagagtggttgtttggtgacaagtttcagctacaattgagatgcgaataatattattagaaaagcctctactactcttcctaatatacaaacaagaagatccttaaatcctcatgtccttaccaaatatgcagctaacggaccacatgcatgttcactactgttgactgttgagtaatgggtagctcccaagaggacttcaggagctctataccgcagggttagtatctgaaaatagatacatatattggcatacacaggtttaatattaaccaaagtagagaaaaatagacaaaaaaaaaattgtctttttacctcctgtatattgcttaattggcactgaaaatgtttgagctagtctaagatcagctattttaagcatcactgtttgtcggtccttaagagcaagagattatgggacttctgttttactttattttttttatctataaatattaattgttaatttattaattttttattagtagaaaaattaaactcgtgattttttcttcttcttattttttaaccatccaatcaattttatatatccttatatgctttaattcccttaataaatgaagattcaatttacaggaagactatatatataatatgtgcaagtgtgagcaagagaaatgaaaggaaacaagcaatgagaatatgttaagtacctgtgcaagactccatgaccgaggcagaaagcaatgcccttgcaaagttggtacatcaagctctgtaaccaaccaaattcataacattgataaaaaaaacatatattgattgaataagtttaataattaatcatttggtgtcaattttgattttagtccatctgtttaaattaaaaactctgcattttcgtctttatataagtaataacttaatttttaaattttagttcttgtgttcctattttatgacgattttacacctctgttagagaactaacaacatggactaaaacataaaataaattgcttatacatatatattagcattaacaataaccaaaatacagcgccatgcccactctgcaagagatgagtgctcatcaattgtttagcacttggcaactccaacagtataaccacaaaggttgaatatatcaatcttctcactgacttgctttgtttgaacatattctgcagtacaagtataacattaatatattattttgtatgacataagaagtaaaaataaaatagaattgttgtatatgtccctttttaattcataataggaaatatatttattaattgtttaacatatgactattattcttcaagttaagtgtactacaacacaaatcaaattaacatttttaattataattttatcacagttaatcctcttcaaaattacatgttcttaaatggaaacaattatctcttgcacctaaataaacaaaaccttagtacctcataggggatgagcggttccgttaaaaaagaagtgagagagatgcattgagcgctgaagagctttggcagtgtagagtttaagggtaggtccttatataagtgacaagtgtcctcttagacagcctgaattatattaatataatattaatagatagatagattaattaattcaatattatttaattatattaaaagatagcttgggaatgtggaagttattattgtctttcttgatcttttgacatgggcattttagttttttatttttcttcttctttaatgttataaattattatttaagaatatttaaaaattcaaatacacataatttaggaatataatcttaacctatataattataggcaaatcatttaggtgtcttagttattatgtaagaatttaacacaaccatatactataataaaaattataataaatctgttgttatttaactaaatacattactttaaagtgttttattaacatgtgttcttagatattgattaaaaaattaaaaaatatttattacaaaaagtcataaaaaatataaaaataatcataatatatatatatatatatatatattaataaaaatatttatactgttaacattcttaattaattcgcttgacatttgtctgcttcaaatgagatttgtaacatgttaaacaaaagcttgtattggtgtctgttactaatgtaagtggacttttgtgattggtcatgtttcaataatatacgatacgcacacggaccccacacacaactaaaataaagtaaaaactaaaactgaaacttcattaatcatattcacacatcatgtcataattaatgatttaataaatactaataaccgatttcccaaggttaggatgggattaacctaaccaatgttataaatatctctgaaacttgaattactccacatatttgggcttttatcaatgttttaatcccaccaataatgaatgacacccccactacacgttcaccaagagcaccaccataagcaataataaaagcaagataatgctcaacactctgttccttttctcactcactctttcttcccaccttcctctccttcttttctcttctttcttcttcttcttccatctctttttttctgcttaaggtctacaaaagttcttcttcttcttctccccctattcacctttggtcttcacacgagaaaacccacttctggatcttctggtaaggttcccctcatgaagaaaaaaatctccttttcattattcagttccttcttgattgctgcttggtctataaaattctggccttttttttttgtttttgtttctttttttgttgtgtgttttttcttttttttgttggtactaattttacactatgatttgctatgttctagtctttttcttagccttctgaccttcagttgacacacacacacatatatgtatatatgtatatatatatatatatatatatatacatgtatgtatgtattctttgctgactgttgctatttatagtgttttcgggtttctgagtgattggtttggccttagatcctttgttgatggctggtttgatttgtttcctcatctgtattgggaaagaaaattttgaaacctttcagtcgtcatatgtttgatgatgggttgatgagcgatgttttcatttttaaataatcgttgaaccatggcatgtgcttttggtgcttgtattttgactattttcatttttaaatttgtgggtgatttggatctattcaatcagaataatcctgatccaataactgttttgatgaatggtgttttagggggaaaaaacgagaattttgagatttcatttagtgatatgatgcgtcgatgctttaaaattattgatgtatttgtattgtagctatgcaacataggtgataagcaactttagattttactttttagcctatatccaatatggctggatgagaatgaaagaaaaaatgtgctggtgaaaattgggttgctagtgaatctcatacaagatattgacatagattttatgcttttgaattttgatattcgcttcatctggaaagtatcatttgatctttgcaccgtctcaattgttccctgtttttaacttttggcaggtgtaaaggccattagaagctttagaaattttcaaattgagttggtgtatagtgttgaagggggtgaaatttggagcccagtttgttactcacttcatttgaaagctcataggttaaaccctctttttctggagatttatctgggaaaagatgatgatgtttgaagatatggggttctgtggcgatttggatatgttatgtggttctcttggggagggggatattgctgtgaggcaaactgaaccagatcctgtagttgaggatgactacagtgatgaagaaatggatatggatgaactcgagaagaggatgtggagggacaaaatgcgtcacaagcgattgaaagaacaaaccaagtccaaggaagggactgatgcagcaaagcaaaggcaatcccaagagcaggcaaggaggaaaaagatgtcaagagcccaagatggaatactgaagtacatgctgaagatgatggaggtttgcaaggcacaagggtttgtttatgggataattcctgagaaggggaagccagtgacgggagcatcagacaatcttcgcgaatggtggaaggataaggtcaggtttgatcgaaatggtcctgctgccatagctaagtatcaagctgataatgcaatccctggaaagaatgatggatgcaattccattggtcctacaccacacaccttgcaagagttacaggacacaaccttgggttctctcttgtcagcacttatgcagcactgtgatcctcctcagaggaggttcccactagagaagggtgctcctccaccatggtggccaactgggaatgaagaatggtggcctcaaattggtctacctaaagatcaaggccctccaccttacaggaaaccacatgacctaaagaaggcgtggaaggttggtgttctcactgcagtcatcaagcatatgtcccctgatatcgccaaaattcgcaagcttgtgaggcagtccaaatgccttcaagacaaaatgactgcaaaggaaagtgcaacctggcttgccatcatcaaccaagaggaaaccttggctagagagctttaccctgactattgccctccattctcctctgctggaggtaatggatccttggtgatcaatgattgcagtgagtatgatgttgacggggccgaagaagagccgaacttcgatgttgaggaccggaagcctgtccatcttcatccatcaaaccttgggatggagagaatgaggggaaggatgccaattcagcaaccttctcatccaatgaagggagatgttgtcacaaacctagatttcatccggaagaggaaaatttctagtgacttcaacatgatgatggatcagaaaatctacacatgtgagcatccccaatgcccttacagtgaagttcgccttggtttccaggataggtctgccagggacaatcatcaattgaattgtgcatatagaaacagttctgcagattatggtggtggtcccaatttccatgctactgaggttaagccagtcatatgccccaagtcctttgttcaacccaacactacagctcagtctgcaagtttggttgcaccttcatttgatctaactggtcttggagttccggaggatggccagaaaatgattagtgaccttatgacaatctatgatacaaatgttgtaggaaacaagaacctaagttccgccaactgtgtagctgtagaaaatcataacctttctcatgccagcttacaacaacaggacagttttttccccggtcaaggaatggtgttggaagggaacttctttgcacgagaggaaggtcaatttgaccggttcaaggccaccatgaacatgaatatgaacatgaacatgaacactccttttgataccaaccacaacaataataatatccattcgatgtttgattccccttgtgatttgtcatcctttgatttcaaggaggatatacaaggagtaggaatggattctcttcacaaacagcaagaggtttcaatttggtaccagtgaaaatgacaagagggaaactcgtgtatcatggactttttttgtgtcattaaagggggtcatgtgaaagtcccttgactcaaaaggcagttaatgcatttttcttcccatgtaatcgtttaggtcttagatattttatgatttggtaggtctggtatgggggtattatattatgggttaataaatcatgggtgttcccataatgtaacgctttttatgtgtctttttgtgttagccctatgttgttacttactatcatatgtacgactgtgatataaataaaaagatttttattctcttataaaatcatagttccactgctacattcatagttaaggaatctgaatatgaggctcttttattatgggaacaacaattagattggtggatgagatgagagaaaggcaattggcaaagcctttgttgcattgcatctttctctcattcatctggtgtgctgtgcttcttatcttttcacctaaaaaatggtcccatccaaagtttgtttggcatatgccaaattacattacatggctattcaattgcgtgatcatgttgaatgtgtgctagtggtgtggtggggtcttttcaaagggacacgttgtctttgtctttttgtagtcggcagtcaaatcctttggcgtgctttggaatggttcctcttgagtcttcattgaaagaaaagtgccaatttacgagacaatgaaaggggcacatctcttggatagtcttagctcaggctgctgaatttgcacccaattctcttctctgtcctagttaacgtgccaatgccacattaatgttttggaaagtaccttcatttcttacatataaggggcatgtgtagataattatcatgtgaagtggcacaattgtcaccaaattcagtgaggtagcgaggtggtttgaaagggtagtataactaattgcaatgtgttaaagattgcatatggggaaacccacgtattgtaggattagttaggggtggacatagtctgatttatccaataactcgattaacctgaactgatttgaagaagaaaatctaaattggttttggattttaaaattataaacttgatatttgacgaatctagaacctgaactcataagggctttaaattgtggttattattgtagttgcaatcatgattgcgatcttgacgtgattcttgacattgtaaaaatttgtgaaaaaatatagttaacatggtcataattgcgattgtaaggagattgattattgacattgtgaaaaacacggttgaaatggtcgtaattgtaattgtgagaagattacggtaaatccataaaccttttatgttgtagtcgcaaattcagttgttgatcaatttaaaaccatgatcaatttttttgaggggaaaaaccatgattattagaaatatgaaaatagaacatgacataaaataaaacgtgtagttgaataaaaagtacttagtgaacttaaaaaggaataaaactagtcagtaaagaaacaaaatttgacaaccactgaaaaattggagacaataggttaaaattataaaaatggagaaaacaaaaagataataacactaaatatatacttgttatgataaatggtacctattctcattgaaatatttttaaaattttggaatttatacaggttaatataaatttatgaatattttttcaaatttattaatttgcacccacttctccttgtgcttagtttacgtgccaatgccgcattaataatctttattgttttgcaaataccttcatttcttagatttcgggggacatgtgtggtaaattatcatgtatagtgcacgctacatgtttggttttgtagagttttttttttttttttttttttaaataaaatatgcataattttcttttgatactaatttaaactcaaatttatcttttaattttatttacctttttatcaaattctaaattaatcaaaatctattttttctaatgaattagagaattaaaaaaaaattcaaatttaccttaggattctcttatttatgtttttgcattaaagtataatttttcattctgcattctgcaacaaacattaatttatcaatttatacaagatacatcaattaatctacatagttaatgtatatagatatgttcaacaaattgaaaatgaccccctcgataaaactaggattttgtgaacctctcagtcttaactagcaaaatttaaaaggaaaatattacacttgaaggatctgattctccgaaagagaaaagatactaagtacatcttacttaaaaagataaagatcatttataatggtttgattaaaaaattaatatttaagattgtgataaaaaataaaatatatagtatacaacaaattttataagtaattataattataattattaattttctaattagctgttattaatatatactaccatttatcatttaaagtgtactctccttccttagacacaaatctcatattgaaaataccaaagtgtaatcaatgttttctttcttaatagtgaaaataacttataaaactatagtacaaaatgaaaattgaaaaaaaaataaagtgaacaaatctctctccgatccctttcttgtcggagagtttgcttagctaaaagatttaaaaaatggaaaccattcactgtagacttggctgctaataacttagagacgtggttgactaggttctatgtttctaaaatctaaattattggtgaaaactataagggtctagcttactatgtatatatacataaattaaattatggctaatagttaacgatctgaatctgatgtaggtagcacactaagcaagaaaactctaggatcccccagccactgcttttgcttagttttgctttgtcttaaatacaaaggaagacagcggcatagctggccatatgcatgcctttcttgtgttgcatccatgttggactacagagccacaaaatgatagataattgcagcagaattgtgcgtacatgtgtgataccttatattttcgaaaatagcaatgtgtgccacagtttcttgacttatatcacttgctagttgacagtttctcaatatcaactactatagtatttgatgattgtgtattatagaaacaacttgaagcctaattgtttaattagaagagagtaaatatatagtgtgtatgcatgtaaggaactttattctttcatttaattatatatggtaaaattgtcttcactaatattttagatgtgataaaagttagattttgaatatggtttaaggaaaaaaaatagataatgtatgttcagtgttcttttttttattattggtgtataggtttggaagtttctttctttcttttcatttgatatgatttgattgtatacgggttaaagtgtgacttgaactatgttttctaatatgtaaaaaatatgaaaaattataatagttaacttcaaagttaattaattatgagtataattgttatgtgtttgatcaatataaaaattttacattatcatgtcagttagaaataactgttgatataattttttaaaataattatgataaaaaaattaacaattttattatatataataatttataattaaataatgatggaaaaaagtattttatactattaatacattacatacactatttattcaatataaattctaattgatttactgtataattttttttttcaatattgagatcatttaactcatttgaaatgatgagggggtgtagataaaagaaaccaaactttcaatattgaagctttttacttaattattgaagccacgtcgtagaatttaattaacaaaaaattgaagtggggtatgctatagtaccatatctgtttttctacacacattgtgtgacaacaggaactttcacatgtcacattgtagattaagcactcatgcagcccacctttcccaaaatgatagctcccttgctagtggcagcatctcagcttaaatgcgatatgatcatatagatgttgatatatggcaactccatatgtaaaaaatatgtaattcttttctttcacctttttgagttactcagtggcttctatgcttatccttttctttctcttttcacctaaactatatatctttaaaaaaattattcgtggcatcaaaatattatatatggagattccaaaagtgtcaaataagtcagttctctagagagacctcttatcaacagcagttgcttctagattgatttcaaggattggctattggctaataccaaagtaaaaggatataaaagttaactagtttaaaaggtttcatgtgattttcatgttttcttttagtgagatcctgatttaagcatctatctgttaagactaaagacttagtttacaatctttccagttatccatactatttttacctttatataataaacagtttgcaaatttaagccaccaactttactgacctattttctttttttttgtttctttgataaaattgtaattagtgacaaccaattaattttatatatgtcatgttgaagtgggatgcatatatctacaagccaaaataaattattgggggaaacgatttccaaacaaagggaaattttgaaatatataaattaaaagtagcactttatatcaaaacccttctagaaaaaggttaagacatgaaataaaagaatgtgagttttgttttgtagctccacaagatgcaacccaccaacgctccataaggtagcctagttttttcaattattatattgcagctgaaaggcatcttgaataagaagttgaaggagatttttttaaatttttaaaaaaaagagagttgaaaagatagttaggtatattgaacgagaaaagagaataagtggaagagagagaaagcatagtggaatattactagaagccgaaaaacaagaatgcctatggtcctatgcttttgaattttgatgctgcaaaatcaagtagaaaaatgttactattgtataacaaattttacaatgaagtaggggagagagaaaagaaaaatataaaatatgattaataatctttttttttgtcaatcagggtattaattaataatctaatagaaagagagaaagaaaaaaatatgattatataaaaattgttatatgaataacaccacttaattaaatacgatgtcagctaagctgttcaaataaacaaatattctgcagtataatatgcgaaaaaacatgcgcaatttaatttgtataatttttttttcttgattttgtgcagtgtattacacgtataatttcagaaaccttaaagtcaaaactagcacatttagtcacgtctctatcattaatccactgttaaatcacggatggcatattaccatcaacgtcctagtcaaaggatactaataaaataccaaaaatgatataatattaaataatacaggaaatgtcctaatcatggtaagaagggagggaataaaagaagaaaacaatagtgttccctcttttcttgtgtgactggaaattgatgatgtgagcgtttcgatcaagaattgggaactgggcccgggcccaggcccagtaagatgaagattacaaggccagtttttatttttttggtgggcaatgagagtggcattgtggttaaaaacttaaaaatttagaattaggtagtgcatcacagtgggaaaaggaaacgtgaaaacaaatcaaacaaatatagcaaattatcaattgatggcttgactaaactttctagtttctagccataggattgactcacctagtgataagatttggataatttgcatcaatcatatttgtcaccaaaaaacattgaagtttctaattaaattaagcaattgaggagttgattataatgtatgtttgcaatatcaaattacatccatatgttatggaaggaattattctctttacaacatgacaaatcaaagttacgatggagttgagatttgacatttgatagcaaaatattatgatggagtgaactttaaaattcaatgagtctcacaactttctctttaagtggacaaagtatttcttacttttgtgctcttaatgcaaaacaatataacatttccttttagccaactcacgtgtagatttttccattttgggcctataagatgatacttttaatcaaagaattttacttttttatttttattctcttaaactaaacaatttatcattctactgttctatttttcttttctgtaagtatctttattttattttttatcaagtttattgttgctaaatgtatcattctactccttatcgcactgcatatctttattgttttcacttgtggtcatatttgcttgcatttttttgcctctggtatgttagttttagtatgagatggaaaacaatttgatgcactataatgaaacattcttcatttcttagtggagttcttaatttattattagttgatacatttagcaatttatcttttacttttaatttttaagtttgcttatacaataattcttaatcattaaacattaaaaatattttatgcaaatctagcatagcacggcggagcgaagcggagccgtcccgtgcgtatgcgtacgggtactgtaactagtttctaataaaaaaaggaagagactaaaagtgcttggctgatattttttagacactactacacaatttacttattgggccgatattacatgttaaattttggagcactttagacattggttggcccagaacaattatttttcatttttaaactacgagaactatataatattataaaataaaaggaaaattaaaataataaatgtattttgatttattattttatttttgttttgaaaaaaacattaattcagactatttattgcaaaatagtttttttttgcttctattatttttctctttaaaattcaactctaaacattctcgtaaaatccttgttctttttggaggagtcgatgaaggaaaatcaaaattcttgaaaaaaaaagttccatttttgtcatgctcttcattgagctgtgtctatcaacgaattgagatatgatagtggtttgagtagctttcgaatgtgttgaaaatgttgtaacaaagtgtgaatctattctcgattccagtggatatcttcgtgctagagaaatatgactccgaatatgtctcagttaaactactaaagacaaagtattattcgtttgctattaagatcaaatgtattttggagaaaaaggacctcgtataaggaccccgtatatattatttacctgttaatttttatcaaaaaagaaaaagagcaaattatgttaacacctttgagattttttcgaattacacacaatacctataactgcaatttattcaagaacattaatctttaaaagatgactttggtatcagttttccaaggaaagttgttcttataactgcaatttattctagaattaaatccttgttatttgattattcgaatttatctacagaaaaggaggcttgaaaaaatgattaattgatacttcaaatccaaaagatgcagcagaagttattgaaacttgctagcttgttatccttacttctaggtttttctagtttactttgtcagaaacacattttggcatttagctatggatccatcgccattagtttcatttagtaaaaataacactcattgttaatttaccccatgtttttctagtttgctttgtcagaagcacattagcctttatactcattgccattgtaggctacatggtattcggagattatttggagccatgaatcaacttagatctaccaaaaacaaaaataagtactaaaatagtgatatgataaatgaatttatccataaggttgaataactcgttgctgggacaacggaacaaaaaattgtagagaattcattcccgcactaatcatataatcatatttctttagctataaattgaatccttaagaatatccattcttgtaaaagtaaccattgtagtacagcttgttctttaatataaaaaattatcaatagaagcagcagtatgacaagtttgtttcaaactactctaactatcattgtagtaattactaattacttgccataatttttatctaattcaaaaggtgagaaattaagacattttattgttctgatctattcattattcatcatgtcagcaatctatctagaaaaattaaaaattgtcattaatctacctagaaaaattaaaaactgtcattaatttaggaaacaacaatgacccacaatgctgacatggcgaacaatgaatagatcagaacaacaaaaatgtcttgctccaggtttctcttcaaaagatacttgtattccagtttataacgtgtgttcccagatgactcagattgatgctaggagctctatccagtcccaaaaggttcagttttggaattggagctttctcctttcccagaggagctctctccatatttggtcctgcaaaggttgaaaatgacaggacgcgcttttgcattggatccttagaaatagaagatagtaaaaaatagaaagttgtggttaaataaaagtttccgtgtgtttggacttgtgccacacaactaataattacttatgcgttatctataaaattttagatgaatttttgcattaatgcgaagcttcggaggcagaaccaaactaacccttaaagtcaaaggtgctgccaacgaggtcatttacagttgctttgtatctggggacaatccagtgacgtcgtcttgaaaagtctctctcacaaaccttttcttttttcccttaaaaattataagagtatttttacatcaagcaaacatcacttttctcttctatttttttttctttatgaattcactttcatgatgttagttaagtgacatattaatttgtttaccatattagaacgaaatagtttctgtcaaaaaaatattaatatttattgaaaactgtgatataagaagtgaagtgatagcacctgtttttaagttaatatattatatagtacttaagatatatatatatatatatatatatatatatatatataaggaaagaaaatgtgaagaaaaagagataaaataattaaaaaagatgctataaaaaagaaaaataggatcaacacatcattctgctatatgattatcgatattatctataaaataattttagatgaatttaatctgtatatgattttgttaatcatgacatgataaaacagcaacctacctaccatgttctcagttaatgtctcctcagtcttcttcttgttctatgacactattgtgctactagtcttctctcaaaatcaaaactttcccctaatcatttgcttgccacactgcattccaccctactaagccccttgttcagatttatgacctcatcttctcagaaccattcgttttctaactgcagaaacttactggggttcccttgttccttctgaatttgttcttctacttgctttggttagcattgttacttcagttgctacgcgtatatgcttcattactcaactttaattcttgtgaattaagaggtaagaatgcatcattgtttgaataacatgcactaaaattactctcttgcctttaattttttgttgtacacttgcggcttgcccctttgctctcacttccattgtgttgctttccctcatataatcatttgtatttggttgatgcttggattaggagctattaggaaaggcatgcaggctatctggttcatgctattgttgttggtggctattgcattggggaattcagatattgattcactccttgaattcaagaagagtattcagaatgacccttctggattagtagttaattcttgggattccaggtctttagattccgatggttgtcctaagaactggcatgggatagtgtgtagtgaaggcagtgttatatcaatcactctggacaatgctggtttggttggtgagtttaatttgcttgcaattagtggccttacaatgcttcgcaatttgtccgctgtgaacaaccagttcacaggagatctcttgcatattgctacaattcaatcacttgaatatgttgatttgtccctcaacaagtttaatggcccgttactctctaacttcactcagttgcgcaagttaatatatctgaatctttcttcaaatgaacttggaggtactcttcctattgagtttcacaaacttgagcagttgaagtatttagatttgcacatgaataagttctctggggatattatgcatatattttatcagatgggcagtgtgctatctattgacttaagcagcaacaggttttctggtacaccggatttgggacttgcagatgagtcatttctctcttcaattcagtatttaaatattagccataattccttgagtggtgagttatttgctcatgatggtatgccataccttgacaatttagaggtctttgatgctagtaataatcagttagagggtaatataccttccttcacgtttgtggtatcccttcggattcttcgccttgcatgcaaccagttgactggtttactgcccgaagctctattgaaggaaagttcaatgatgttgtctgaactggatcttagtcaaaacaagcttgaaggtaccttctatgttttctgtgaaaattgtaatgatattctttcttcaaagttaaaacttatccattttctatataaatgtatctaaactcaaaaatgcaattgaaattgctagtctactccccatttgttgctgtccgttctgctaaccttcataaatgaagttttagctatgaaaaactactgccaaaaacccatatcaagctgctgtttggttgctgaaatatgaaactgcaactttctttctgatgccctgttctgctattttagttattttagataaaccctttggggaattttcttctgtggaataaataaatacttttcacaccctcaatcatttctagtaacaaagattgtagaggaaagtacaatatggtgaccaaactgaaatgaaagtctattagtgatcaatattggctgaaatacaaattatttcataaatttcttacctgtatacgaaatagtggagaactcaaattaaagaaaattttatatttgtccaatttgaagtttctgttccatggttcaacctattgatggataaattgtacttcaaacataattctgtatgccaaataagtactaaggaagcctgcattaattataaaataggttaaattagttttaaagtcctctaatttattatttaggttcaatttggtcctctaatttttaaaattgattcaatttggtcctctagtttttttttgttcaatttggtcttctactttttaaaaccaattcatttttttttggaaaatgtacattttgtggtggtctaaaaccacttagtggtggttttgaactgtcacaaagtgtgatttcttacaatttagactgaaggatcaaattgaattaatttaaaaaattagaggaccaaattgaacccagaaaaaattaaaagactaaattgaatctaaaaaataaattaggggactaaaaatctaatgttaccttataaaatacacagtatattaaaaacttaacgttagtattttggttgcatataatcagcatcagtccaatatattgatttatggagtcagtttgagatgcaaaatttgaaaatttgaaaagtagttgatgttaaaccctcttgaggggatcttttggatagtatacaaccaggtatgcaactattagcagacctttagatctttgcagaaaattcttatgtggtaacctatatctgcaataaagttggtgtccaggttataccatttttatgtattcatccgttaatccttatagaagccatttagttttctatgtacaaacattgtgggaactgggaagtaattccaaaatctgtccaaaagtatgctacatgtgacaaacaatctattctgcacgtagaaatcttggtatactttgttccctttgtctatacccaattgtttagcattgacttattcatcaattttagtcataatatcataaaatcacacatgacatgagttcaaagtgttattcaatgagtttctgcttacccttttcctcttttacaatttaaactttctttgtaggtcccattggaattattacctcggtgactctgcggaagcttaatttatcttcaaacaaattgtatggccccttacctctcagggtaggccactgttccatcatagatttgagtaacaacacactatcaggtaatttctcaaggatccggtattggggtaactatgtggaagttgttcagctaagcaccaacttattgggaggaatgctaccaaatgaaacttctcaatttttaaggttaactgcacttaaggtatccaataactcattggagggatttctcccaccaattttgggaacatatccagaactagaagagattgatcttagcctcaaccagctttctgggttcgtcctaccaagctttttcacctcaaccaaattgattaatcttaatctctccaacaataaattttctggatcaattcctattcagtttcaacctccaaataatccattagtttctgcggaaaattttagtctggtgtttcttgatctttcacacaacaacttgagtgggactcttccttcaaatatgagtaggcttcacaatttgtcatatctcaatctatgcaataaccaattggaaggtactattcctgatgaccttccagatgagttgagagtattgaatttgtcctttaataatctttctggtgttgtgccagaaagcttaaagcagtttcctgactcagcatttcatccaggaaatactatgctggtatttccacgttcacaatcatcaccaaaagatacttccaacctaggtttgagggaacatcagttacataaaaagtctgcaactaggattgccctgattgcatgtttggttgctggtggttttgtgatggcttttgtggctataataatttattataaggtccatcatgaaaaagaaaggacttctaaacaaaatgaagcaaggagcaccacccaacagagtactttcacctcaaatacagaggcaccttatagaaatttggaagcattaccacccgctcaaaggggttcttctgatgatgcaataaacattcatccagtgggaaagaagccaatagatcctggcccttttgaattaggtaagaacgaggaaggaacatctaccccaatgtctattttgtcaccttcaaatccttcatcttcaaaaagctataagtttgagaatcctggttccctcaaagtctcctctccagataaactggttggagacttgcatatatttgatggatccttggtgctaactgcggaagaactttcatgtgctccagcagaagttattggcaggagctgtcatggaacactctacaaagctacacttgactctggtcatgaattggctgtcaaatggttaagagaaggaataactaaaggaaaaaaggagttggcaagggaaataaagaaacttgggactatcaagcatccaaatctggtctctgttcaaggttactacttggggccaaaggaacatgagaaactgattatatcaaattatatgaatgcacaatctttggacttatatctccatggtaagattatggcctcatgcatgtttgattgcagcataacacctagacttttggttgtaaattgtaatacttctgttttatttagttgtttcaaatttttctgcagagacagataaaagaaatctccatcctttgtctgttgatgaaaggctcagggtggctgtagaggtggcgcgatgtctgcatttcttacacgatgagaaagccatacctcatggaaatctcaaatccacaaacattttgctagaaactcccaacagaaatgtcctcctcactgactacagcctgcacagaatactcactgctgctggtactgctgagcaagttctgaatgctggcgcactcggttatcgacctcctgagttttctagatcaagcaaaccatgcccttccctgacaagtgatgtctatgcatttggagtggtcttgttagagctcctaacaggaagaaattctggagaaatagtttctgggattccaggggtggttgacctcactgactgggtgaggttcttagccgaacaagaccgttcaaaccagtgctttgataggtctataatggacaagcacaatggggaaagacaatctaaaattcttgatgaaatgctaaaggtggctcttagatgcatccttccagcatctgataggcctgacatgaaaactgtctttggtgatctctcaacaataaggtagagttgctgatcatatcatatagccttaaccactaacatcatcatcatctatagttgttttttgtttaagtttcttttcaagtttgttgaattttggtcccttgatgacagctctccacaggcattataacaaattaacaagtcaggatatgaaatgaaattctttgtcaaaaggacattcattcttttcaacccttcaatgggcaggttgtatattcatgaattttgcagtattgttcagtgtaataattgatattgcttgacgttctttttgccatcgctgcaatcaatggaataatgctatgatccaaacccattgcatcttttattgcctatttctcttcctttcatgctttgaaattgatttaaacaggttggtacatgtacattgtaacaaccttggtaggtgattggtattggaaatttttagtttccagcaatctgaagtttagggacgttagtttatcatgcttgatatataattttaaaagaacctcaagatattgttttcgaggaatttttttgacgtatattgttataaaattgttcctatgggggttgggaatttaactttcttgaattaggaaaatttaatgatgtaaaaagattacagtatactcattccattcattataaatttgaattctcatctagaatgagtattttgaagagcaattcttcaatgagaggatttttcttagatgaaagtgtttttaagaattattatctctctgtctcgtatattatcccaatctcacatatattgaatatttaatttaattttaatatttattccttttaaatatacttaattttaattggccatctcaaattattatcgtcttatttttatatatatcttgatttttttaattgcttattttttcaatttatcattatcatctttattttaaaattgaacttataatatttttataataattttcaatatttaaaataattataccaaaatataaattatttatcataaatttaatatataatttacacatttaaaaaatatttatttattacaaatcttaattataatataatttataattaaaaaatatttattgattataattttaattatataaaaataaatatttatcttatacgtacattactcatactaaaatactacaaatataaatttttgaaaccagtgataattaaaaagtatttttttcgagatgtggaaattatcatcaaaataaataaagtctttcttccatgaatgtaattagaaaacaaatctctgccatgttatttaagagcctcagctatcaattatgtcttgttatttttagcattacttttaataaaggatagagttaaatacgttttccttctatgataaaattagaaatgtactttttcatctttgtaaaaaaatatttgttcgtaaaatataaatgtattattttatttgttcgtaaagtataaatgtattattattttttttgcccagagcatgaattattatattgaaatctatatgtataatctttttatatcagttatatgtaattatacataactgatgtaaaaatattatattttaaatcaatgatatatataaacaatgtaataaatatatatagattcagacataaccaaacctactttaagcaaaaaaataatatatttcaatttaaaaaaatgaaaaatagattaaaaattttgcaggacaaaaaatatatattattaattttatgaggataaaaatatattttatttatcatttttcctttgtgatattaaaagtaatcaaaacaaattataaactcgaactaaaaaagtaattaaacaacataaattttaatattttagtacttcttatgtttctatttataatatccaaacttaaaataatgcttgtttttttataagatttaatttataatatttcttgcatgaattattttagactacaaataccaaaaagaaggcaaaaatttaaaaaaaaatacaatttaattatttaattagcaaaagggggcagttgaaaaaatatttagcaaaatggggtggtcaaacacgcccagctggggcgtgtttaaacacgcccagatggggcgtgtttcaccagatggcgccacgtggcaggctgaaacagtgtcctagggttttcgcggtgttttcgtaaattacggaaggtcgtaacttttgactgggacgtccgattggcgcgaaaccggtggccacgcgctcgaaattgagaggagaaggcctgggcaagttcccgaagggtttatgttttagggtttcagattttggattttgggtatcgaatttagggtttgggatctagggtttagggtttagggtttcagatttaggttgatgggtttcagattaggttaggggtttacgttgtgattagggtttcagattttggattttgggtatcgaatttagggtttaggatctagggtttagggtttcagatttaggttgatggatttcagtttaggttaggggtttacgttgtgattagggtttcagattttggattttgggtatcgaatttagggtttgggatctagggtttagggtttagggtttcagatttaggttgatgggtttcagattaggttaggggtttatgttgtgattagggtttcagattttggattttgggtatcgaatttagggtttaggatctagggtttaaggtttagggtttcagatttaggttgatggatttcagtttaggttaggggtttacgttgtgattagggtttcagattttggattttgggtatcgaatttagggtttaggatctagggtttatggtttagggtttcagatttagggtttaggatctagggtttagggtttagggttgactatttagggtgtatggtgtagggtttagggtttatggtttagggtttagggttgactatttagggtgtatggtgtagggtttagggtttagggttgattatttagggtgtagggcttattgtttaggatttagagtttattaaatcctaaatcctaaacaataaaccctacaccctaaatcgtaaacccaaaaccccaccctcaaggaaagagctgagaaaacagaagcaaagtgaagagataaaatcaaagaaaattgcagttaaggaagtgcttgccaaggcaaaacttgaattggaaaactaattactcaatattagtgaagtgtatgtaacactcattaggttattcactggcataaaccctaaaccgagatccataacccctaagtgtgtaaccgaagaactaaaccccaatcacaacatcaaacctaaccctaaaccagaatctataaaccttaggtctgtaacccaagctctatacactaatcaaaacattagacctaaaccctagaccggaatccatacaccctaagtcccctaagtctgtaaccgatgacctaaaccctaatcacaacatcggacctaaaccctaaaccctaagtctgaaaccctaaaccctaaaccctagatcctaaaccctaaattcgatacccaaaatccaaaatctgaaaccctaatcataacataaacccctaacctaatctgaaacccatcaacctaaatctgataccctaaaccctaaaccctagatcccaaaccctaaattcgatacccaaaatccaaaatctgaaaccctaaaacataaacccttcgggaacttgcccaggccttctcctctcaatttcgagcgcgtggccatcggtttcgcgtcaatcggacgtcccagtcaaaagttacgaccttccgtaatttacgaaaacaccgcgaaaaccctaggacactgtttcagcctgccacgtggcgccatctggtgaaacacgccccatctgggcgtgtttaaacacgccccagctgggcgtgtttgaccaccccattttgctaaatattttttcaactgcccccttttgctaattaaataattaaattgtattttttttaaatttttgccccaaaaagaaagattgataatgtattgacaactattagaaagataaatataaattacaaggataattctaaaaagttatgaatttaagataaatttattgttaactaaactaattatttttcttaatcttcatgaattagttagataattgaatctaatgaaggaaataataaacttcataagtatttgcatacttttggtacaattgtttagccttttgaatttgcaatttctctcaagccatacataaacacatctgcttatctgaacacttccttatactaaaagcaggtagaactaactagctaattaatttatagaatcatggacaaaagtgatgacatagtcaggcctaacatttgaaagtgctggttttatcatcaaaaacatagctataagactgatcaagaacacttccccttgaacacgtactttcgaatactcactaggcttgcaactctaatggctaccaaaatcacttttgtgcaacaatactgtggcatgttgaaggccaagtacgcactcttgcaagcagtgacacttccatcaccacttttcacagccaaatctggtggaaatgctgcattcatatcagaagggcaactagtagtgttgcacaacccagaaccccttgttaagtcaatgagagaggcgaattaagcccatcaacgaggcttgtgtcatagaaaccttggccactagcatctgatgatggaaaattaataacaaatgttgctgatcaattatagcatgttcataacaaataataataatcatagaaaggttacagaacaacggagacgtctaactcggtttaactgagtgtgagttgttaaaccccagtaacagctgtctttgattgccacataaaaaaaaaaggttagagaacgtgtacctgaggttagtctgagttccatcagagatgctggtggaattgcacctgcaccattgcatggatttcaccagacccacaatctgcacccccacatgtgaatttccctgaagggtccttggagcagtgacttcttccttaaaatctaccagaccacccatctggggcatccaaggaaaatgaagacttggatggaagttcaaagcctgctgatgataactgtggttttcctgcagcagttaaggttccaggccacactgtgaatgcacaattgtttgtgaatgtgaatttgactgagtgtgcacctgtggctgtgatatgtaacatgtatgtgtatacaacaatttgtagttgaagaataaaacaagattttgttatctacttgtatatataattggcatataatagcaaatgataaagagaggggaaagagaatatgcgtgcatgcctgaggcatagatgcttaggagagtgagggccagtagagcttgagcttccatgatttttttttttccttctgcatgtggttgtgattctcccctctttgtgatgagaccagtggtggatgtggtgttatataggtgcaagaaggatttatatttggcaaattctaatggcccggtgtgcttgccaacactaagattaaccattcaatcacgacgcatgttattctcaatctcctaagtcctaatcctaagtttacacccccaagtttttatgttcttcacaaatattgttcattgtatactctatctaacgaaaatttgtttttaggttaaagtgtgttttttgtttctattaacatgaaatgttcaaaattcatccttgcaaaattttgagtatgtttttctttcttgcaaaatataaatgtgtgatattttgtttaagaactagatttatgatatcttattctacatgacaatgttaggttctcgtcaatgagtcaacacgtcaagttttagttgtcacatgacaagtttcacttgacatgttgatccattgataaaaatattgacacgtaggattagatctctcgagtatagttctaagccaaaatatcacatatttacattttgtgagaatgaaaaacattcaaatttcataagaacaaatttcaatcattttgataattatatggacgaaaaacattttaatcttatttttataatgtatgtggaacatatacaccacaaaacttgtttagtttgtgttatatatgtgaaataaatactcaacaaaaataaatttgtaatgtgttaaatttttacaaataaatattgtatattatagattgacacgccctatgtcaatctactgcacaatagaaacaaattttcttttgcccagttaattcaaaatacaagtttttttttttttgtaaaattaccatttttaatattgaactatttatcatacaaataacctttttaattgaaatcaaattagttacaataaaaaaaaaatattttaatacaatcaaattaattataataaaaattaactttttaattggagtttatttaatatacaagttatcatttttactagtaattgaattaattatgatgtaaattattattttttaattataatcaaattaattattatacaagtgataaaactttgtcggttgcacaaaaagcagaaaaacaaacaaatttcttgcaacaaacacttttagaagagcaagttgtatatttttcttgttaagtattgacccatgagaccatttcaagctaaaggaaaaaaaaaatatatcaggtaaaagccattaattggatatccattttataaacgaaaaaagattacattcataaagcgtactaatttggtgcaaagacaaatgcttatacaaaaaggaaagcattgaagggttgaggccaatccataagaaacaaaaccgcgtgtggcaaagcgccaactaactcgtagacaaaacgaatcggcaacaatcagcattaccgtgcgtttacatgaaaattggatacacgccaatccaaaattccaaatggtgcatccaaacactcctttgacccattcattttcgtttctttgctttcgtgtgtttttttctaaacttgcccaccgtgagtgatcccacattgaactgtactccattttccctcctttgtttattagttattatattaatgtctaggattttcataatcagtatttttagaatattaattaaaaaaatattgtagaaattataaaagagtataaaaaattataaacaacttaattttaattttgtctattttaataataaaaattctcctttttaatttctaaatcagtttcactatttaacatttgcctaatttatatttatatattaaattatcatatccttcttcaaataatcacttataagttataatcctttcttatggttttcatgcacttgttttgatagtttcgttgtctttaagttttatctcttctatctatgatcctaactaatttcatagtcacggctgaaagttctaattaattaattttgggagatttaaaaaatgttccatatgggtaagtgtgagtcatctataattaattactaacaatcaacaatgattccaacgtgcaatgcagcatttgttgatagggtgtgttctttttgactactaccatctaataaaaaaacattttgaagttaccaataaattttttttacttaatttaattttgaaaagtcccttaatattttttaaaattatactagcattataaattataaatttaatcttttagttaactttatttttaaatttttaattaatatctaaacaaataaaaataattacaagattattttcttaaaagaaaaaatcaaatttgacttagtaattgttttgaaataaattattattaatatatattcttttttattattattgtccaatagtaatttagattaaattttcatatatgacaaatgctaactgcctaaaatatattagtagaattcttaaaccgcgtgactattacattccaacgcgtaaaccgtttgcttcttatataaaatgaatagaataacgttgtgattcactcactcttctagcttcgaattttacaatttcatttcacttcaattttcagatagcttcttcacttgttactgactcgctcaatggctgaccgagttcaccccagccactcgccttccgtttccgccgattcacaaccggcatcgcctcaagactcctccgtcgttccgaaaccgccgtctccaccgtcatcggagaagccagtgcctccgcctggaacctacgtcatcaagatcccgaaggaccaagtctaccgcgtccctccgccggagaacggtcgccgcttcgaccaatacgctcgccgtaaacaccaccggagtcgatgctgctgctgcttctgctggctcatcggaatcctcttcattctcgtcgtgctcctcgccatcgccgccggcgtcatctacctcgttttccgtcccgaggcgccgaaatactccatcgaaaacatcgccgtcagaggaattaacctcacctcaccgtcctccgcggcagctatctcgccggagttcaacgtcaccgtcaaggccgataaccctaacgacaagatcgggatccattacttgaaggatagctccgccggcgtgttttataagaacgcgaggctgtgtaacggcgctctgccggcgtttttccagccgtcaaacaacgtgacggtgtttgggacggcgttaaggggtgacggaatcgacctgaggagcgaggaccgaagcgcgttgctggaggcgcagaccaaacggagagtgccgttgaccgttaggattagggcaccagtgaaaataaaagtggggtccgttaagacgtggaagattaccgttaaggtgaactgtgatgtgacggtgaatgagttaacggcgcaggccaagattgtttctaaacgttgtaattatagcgtggatctttggtgaaaaaaaccgctgagagaaaagggttttttttttttcttcgtttatagatagggccgaaacattcgagattatacaaattttcgtatacattaatgttacattgtagcacatttactgatacgcgtacgccatgtatcttaggatttgatttggttttgtgcataagtcatgtgatttttattgaataataaagtaagtaatttaatcgttcattcttgaatgtgaattcttgttgattggtttggtggtctctaaataagaaaccgcatcttggtcgtacccaccaaatgaaacaactactgtataaaaccttgtttcaagcaagatgatgttggaaatgtattttctaacacattttttaatttttatttaataaaatttgccaaaacatcaacaaattatgaataaaatttatcaaatagtgtattactaacaataaattctttatgctgtaaaaagacaataaactttttattattgactaaaatttattaaaaataatataattatgtgagtcttattcataattttgtaattctaataagttttaattaatactacatagtaaatattgtgctagtaagaatgtgttagataatatgttgttagtactattctattcaatataaacatcgcatattttgtttgtttttctttctaattttgtatgtgacagtttttttttcttaaccaattttcaaagtagagtaggtaacattaaaatgaaaatttctatgtaaaaaactgatttttttcataaaatagtattaaatttttttaacaacatattgctaatgtatcccaccataatttccggtgcatctttatccatcaaaattttcagcatttactgtttccatgctgtcattgtagcaggctgggaatagaagtcattgcaaagttctttccttccacaacggctacgcgtgtttataaaatttgggaatagaagtcattgtaacaggctgggaatagatgtcattgcaattttttttttttttgacataaaattgcatttttttatatttttttcttgtgttttttttttataatttacatattgaaaaacttttttttaattccttaactattatttttggaacactgattaacaatattctttcaagtattaggtgcaagaggctttggttcttctttatatatatatatatatatatatatatatatatatatatatatactagactataaattatactagttctataaattataatttaaatataataattttaatcttttaattaattttattttaaaatttatagttaatctctaaacaaataaatatacactagtttaataataaaaataaaaagattttttaaaaatcaaattggatttaataattgttttgaaaaaagatagtaatttttattctttcttttttaatacaatattaattagattagatttttatatataaaatattttaaccagtgtctaacacccttcatatactagtaatatccgtaaaccacgcgactattaaattttaacgcataaatcgtttgtttattttacaatcatattcagagaacagaataacgttttgactcactcactcacttttctctttcaagtttgcattttcattttatttatatgtataataaaaaatcatttttatattaaaacaccaactatttagtaaaaacaaaatcaactattaatttttcatcaatagctaaaatcatttactatacttttattggactacgatcctcctcctacctttattcaatttagaaaaactacatttaattgctaactactcttatttgttttacgaatcggtcaaaatctatgagtggggaaaagatctactctttggttaaggaataattccaagtattaggtgcaagaggccacggttcttcttttcatatatagctagactatttttttaatttaatttttatatatttataatatagagttatttttgttttagttttattaagatttgttttcttgttttggtattttataatttattttagttctcaaggttaacagacatgacaattgaatttgggtttggaattttctctcttttataaaagcggtgttggggacgtaattccagtcccaagcactatatataatttcatagtttaatttcttataattataaaaaaaaatataaattattattccgagctgtcatattagtaattagtaatatcatggaagctgcaaacattttgctaccgaaaattgttgtataaaaggcagtgatagaggctgttattcttttaatgattattttaatatttttgtgcctaaaagaagatttaaaggtcttgtaatcagccacggttaggggagtaaaatactatgaacactttttaagacattatcatcggtattgaacttgttttaatgatttcttttcatgttatcccttaacacaaaccctattttagtttttattttttaccttgaagccttttatctgatggctagcctggtctggtaataagtgggtacttccccaacccaaataataattagttacagttttttcttttaaaaaaaatcactactttaatttttcatgcatttgttttatttttaaaaaaaataatcagaagccaaacataatctaaaatatcattaaaatcagaagctattttaaatggctttcataaaatcaaatgcttctgccttttttttttaaatctctataaaaaaaatcactagattattttaaatcaaaatcacttgtttttaaaactataaaaattggtccaataatactaaaattagacattcagtcttcttaactaaaagagctctcagccatttgagtgttcctttataaaattcaaataatattattaatcaataattatatacacataacgtaaatgaaaaaatgacacaagcaaagaaaatcaagaagtacaagtactggtacaaactctttattagcaaaaaaattgcacccaaatttcttctccatcagaacctagtactttcagctcttactgagtccttaatcatgcactcataatctctctagtgcaatctatcagatcccttctattcttgggactaaatgaacaaataagtgtggcaatccgtaatgactttattacatcttgccatgtacaaatgctccatcctgtggacttgtatgctccacacaatgctatatttctgcaattccacaatgttccatagcaattctcttatcgtgtggatgtttgttttcagcctaaaacacttgagattgtaactctgatggatcaactttgagattcggaattcggatgaccatcttgagactgagaattcaaatgaccattttgagactgagaattcaaacgctggtaattttttacttcctgaatggcttgtcgaagttctgtgtacattttgacagaacaaccagacaaattatttaattgactaagaaatcgaatcaagcttcgtcgaaattgatcaagacctgtaacccagtcctctgatgtgtcatctctcaataaaccatctgctgattcgccaccaatatcaggcttccatgttgacatatgaggatgagcaccttttccttggttcttgtcttggtgtggtaagaactgggcggtatccgttgccaaactcttaatggaatcggcaacatcctttacaggtaaggcactaattttattcaaccagacagcacaggtgacatatattggaggatcataatagctaaggtcagattgatgcctcctttttctcttggatgatttttcttcatgacgaacacatttgtgaagccatccatttatagcctccagatagaatttctgagctccaatccacttggtaaagcttgatgatagaagttggagttcattttcaagataggaagtaatctgtctacgtaattctgaatgcatggtgattctagcatggctgttgttatatgcagccgacattatctgaaactgaagtttgtggcattcatgcatcatttcccacatccgattcaacctgacatcaaagtataacagaaacagatgaaatacaaaagctagaagatcatatcaattaacataagttgatgtgtgaaccatccgtccctctgactgaaaacatatgttgcttactaatccaagatcaaaaaactagcattcaaaggttgatcgcacaacatcagtgagtcacacaatagaaaaccatcaatcttgcataatcaattactaaaagttaactcttaacactataatttggaaaactgtcaattgcatttgacgataatgttactcctaatttagacaaaaggtttttgatacctagactcttctgttagaaaactctaggtttcagatgcagaaacaacacatttcagcaaggttggtatagaacaaaagcaaaacaataatttcagcagcaactgagcttttttattattgactattacttcgttgttcaataaatttataaccttcagtggaaaacttttaccaaataaagaacttaatcaattttagcaagttgtaccaaaaataaacttcctgataaactttcttattatggaatttcctgattgcacttcttgatgcaccttttatcccatgcttgtatatgtattattatcaaggcagtacacattggcatgaaatagatacttcataaaaatagcaaaactaacatgagcatacccttcaatcaactcctcaagttgtggttgaagctctttgtctcgtatctccgcaatcctctttgatatagagtttatcctatgaattgcaactctgattcttgagtgcagatccttgactttagcacgagttttatcaactgtagaggccttttctccttttgattccagttgccttaagaatttacgcttcatgtcatattcctttctgacaatctcactagcctactcgcagaattgaacgatgatattagcaaacagacagagaaatagccatattctattacatatttacatgtaccaatttattaaaaaaatataattaaacataaaacttcagggtttagtctaagatccaaatccaatacaagagttgtgcaacattttattatcaaaaagtaacatacagaaaatacaggttgacaaatatgttgataagaaatacatcgtaccttcacttcatcatagagtttcctttcccaagcatatagcctatccaaggttgatgcatgacttccggagatcatacaagaattatcaaagagattatttgcatggtcctcagcattgtcaattgagtttgctcctaaagggtttcgggatgaggaggattgagatgacaccgtcctatgccaagttaagtacttatccgagttttgagcaggttctaagaagatgaattgaatagttaacattgaattcaaaaaacagccgaaacacaggcatggatatctaaattaccaaaaaattagatgggaaatttactcagatggtctaatattaatcttatcttctgaaatgagtttcacttttaaaggcagactagagaatgcttattactatgttgcagtaactcaaaatgaattttaaactaagtaggaaacaaataacaccaaatacatcttctcaagtaaacaaattctccagattctctgcaccacagaatcccacacattcaacaatttcttgatcaacactaactgtagtcatatttaataataggatttgcaattcgcatcactcctacagtcctactgagggaaaatgtgtacacttagagaatactttcattttcagaactaacaagaagattggttcaaccccacaaggtcagaaatgtctgggaaaaatgaaagataaacagttgaaatgactcaaattaccttctggaacttgacttgggtcctcttggcttgggtcctccccacatgagaaacataccttcaaaaacgaggacaccagagaaccatctgttacaaataaaaattctctggttaaaattttaaagcattttattttgaaattaatttcacaacaatgaaaagaaatttccaaaagcttctttgaaacagaaagtgaatttttctttcaaaccccaaggatatcaacaaaatttaccataatgcaatttaatggatatccatgctgggagtgtctgtagcctatagggtatctatagaatgtatcttaagtagcagcgcgggggggggggggggggggggatattaactcaaaatctcatcattatattttacttgcactataaagttaagacctactaatatttaatattcccagatgataactgtttcaaagccagatgaaaagaaaagaagagagccagaaagattactttcttttccttggaatattggacgaaagtgaactttgtttgcttcaagcatctttggaacctcttggccagattctgaagctttaataaagagcaattcaatatctctcacgcttgaaaagaaattcttaggggtgactttattttcattacgactttccttctccgttggtttatttgtttcaggtggaggcaaagctggcataggtgctgtctttaatggagataaataagcaaatgtccccttttctccattcactaattcaacttcagaagctgaatgccctctgagaggcttagttgtggcaggttcaacattggcttgaacatgactgttagatctatttagattttcaaatctttggactagagtttctgtagcaggctcttcatcaaattcatcttcagagtccctagagtgttcccttccatgagatgaagccttctcttcttcgtcttccaactcaggaattccctcctcctcccttagtctttgtatgtcatcagcatgccctatatcttgatgcatacccttcccatcttgaaaagaaaattgatggtcaatggggtgaaagagaccaaagaaatcccactgtggagttccagctggaagagaagaatcttcaaatgctgctgttccagacattacactggtattctgtgtagtagtacctgatgatgttactattcctataacaggtacaggtggtttttcctcaactttcttggaagaaatagtgttatgtttcatatgatttgctctgaacttgctagaagaactaggaggggagggagttggagagaaattttcatgttcagctgcatctatgtgatgtgacaaagatgctgaagagaatgagagggtcctttcagttaaagcaagtggttgttctggtgttgcattagtgtacaaagaaggctcaattggtccttcaggttctgtaaattttctcagagctgttcctgtatttttcagtgattgaatgtatgaaacatgagcagctgctaatgagcaacgcccatcaagtgcttgcctcacaaacttcttcctttcgcgacatagctgcagtagtgccttatcatcctccattttggagcttgaggcccccattgttccaaatctggctcaaattggctttccctttatggaaatctttcactgaagttctaactgtaaattcatcaaacaccaaatgtattaaatgaacaataaatgaattaacataacaaacttagcaacaattgccacaagaaaaaatgcagatcactagtatcttttttaggtacacagaaacatgattgtatttgtaacacattaagaaaatggactgacatctaaagaactggtggaatgtcaccatcaactttcatctggaaacacaagcaaacaaaaattgcatctgatctgaggaatatgctgaggaaaacaatgttagtgaaaccactgcaaacagcaccaacaattgaagtgggaaaaccagctcaaactcgaaaacaatcaaagagaacaaaagcatccactatccaaaaagaacgttgaagttgaaatccaaaagacaatgttcaaaaacacattgagtgagtgcgtggagatgcagaaagcaatgaaatttaccacaaaggagacaaatttcaaggaagcgatagatagcccagctccaaaatagaaagtaggatatttattgagtaattagccaaaaaaaagaagtgggatcaaacccaaaaaacagtttatgtagcaggaacaaatggggaacccaaaaagcaaaaatcacagtgaaccgctaataaagaaaattggaatttggaaaaagatggaaaatttggcaggtactaaagctgcaaaatatgaatttggatttcagcgaagacccatgtaagagaatcattgacagaaatgggatttgggaatgttcagagaagagagagaaaataatgtaatggtttcactcatagctggttccatgcaaaagaagcacagcagtgaatcagtgatgcccacctccacgtgggtcccagtgtctgcgaaagttgagcgtgtgagaaatacgcgcttggaatattcaatataccaatgtacaagaaagcaaattgtactagctttcttttcaaaggcatctaattttccatctaaaaaagtgtctaaattcccacaggttcatttatttatttattcgtttaaaagattgaagaaaaaaaaaattgcgaagcttgaattaaaaatgaagttacacgtggattggttgaagttcaataatattctattatacatctctgttagtataaaagtatagttagtgtgagtgttagagtgtctaaactgatacaggtttatttatttattcgtttaaaagattgaacaaagacatagaaagctttaattagaattaaaaatgtgttagttgaaggttaataacctcaaaaaacttataaatgtgttcgatgaagtttaatattctcaatcaagtaagttatgcagagaaaaacttctctctcacacacacaaatataaggattaaagaatagaaatacaaaaataatattacaaatcaaaataacaaaagtcataaatttaatgtagtttgttacataaacaaatattcttgacctctctttaagttgaattactattctaaaaaaagaaagtgagtacattaaagtttaatattcaattttacatttttataattaaaaaacatctcaatgaattaaagtggaggatgattataaattatcaatagtattatttctaagtgagtaagactttttttaggacaactttctggcatcagtgtgtgaacctcatgtttactaaattgttaggcttaacgcatttgagtaattatttattttagctcatattaactaatctcattatttatccttaaaagagagggtgtttaaaaactattttcaccttcaattctcaaaaaatatgtgagactttttttatgtatcacatatctataaaaatctaaattatttgaaaagaattactcaagagtaattttaatatcttcatctttattttttcttaatctaactatcaaagatgagttacacgttaagatcattagacattctatcccaatcacttatatcttatagttgaattatttaagcatcgaagtccatgtgtgtgattaaattataatataaagatttcttacacttctggttcatatactattttacgtaccttgaaaaaagtgcatacgctattttcatatatataataaagctataaaaaaaattaaatgtgtaatttagaaaaaaaaaatactataattgaataatattaaaatgatatcatatatattaagttataagatattaaacatttgcaaaaaggtaagctgggcttagggtggtaaagtggaacatcatcacatgagaagaaaaacaaaagtgtagtgtaggaaatgtggacatgtgattagtttcttggcttgatgacctttttaggtcatgcctttataattgatgatttactttttctacatcgctaattctaaattcgtcttttaaatatggtgggccacagtaaatgtcaccatattcttcaagcatagtgtcagcatattcgttaccgataactaaaactataagtgataatgtgtaaaaaaaaaaaatatcaactttttttttttacatgaaaaaaattcatcaacccaacaatacatactttaaataataaaaaactactattatagttacattaatgctaaaacttttgtatgaaaattataattgactctcataataaatcataattatagtgagaaatgaattaattttagaaaataaataaatggataattataaataaaaaaaacaatgatgtgctcatcatcttttaccgttttcaagttatttttataaatatgtaaattaattaatttaacaactggataatgtgatattatcttaaaaatcttacaaattaaatttcagataatttaaacttctttaagtatgtaataaatagtaaaaaagagaattttaaatcaaattaattatttcatcagtgaataaaactaaagacagcaagaagaacaaaacaactatataacaaatgagatgcctagagcagcagcaagagaagaagaagctgattaactgagattgaggaagaagcagtgcattgattgacttctctatatataggtgtgcttgaaagttgaaagtaatgttccagtccttggctgccaaatcatgaatgcagcagataattagggcatgatgagggtgaaattcatgcaaatccatacaattgatcatacaagttagttgtacaacaacacaaatattatatataccacaaaaacctttaatccattggccgcaatgttattggagaatgaatctgttccgttcaagaaaaacggaggtccagttatggaaaactgggttttaatgtaggatcaatgctctctctctctgaaggtgtcttatgaagatcaaaacaactccaggaaattgatcacagcacaaaccacaaattggagatggggtgtgtgcactgtgagaatggaaaagagagagttagaatatgtgtgtgtgtcttgcacctttgatatgagggactatttatgctttcactgacctgtggataaatgaggaaactttgtcaattcttggtcatgatcttctaaaagatgaacatatattttggatatttgctggggaaataatctctaaaatcatccttgattttatatatatttaaggcttcaatctcttttattctgtccgtaaataaccctttcttgacagttttgggcctcttgatcttggcccaatatataaaatccgtaacagaatccaaaactggagttgtcatctgtgttgatcttcacaaaaccttcggagggagggtgtcattcaacgaagatactctggatggccaacactttgagaacactgacatggtggaaatattagtaaaaatttgtactcttagatactatttattaaaaattgtaatttttgtctctttaattaattttttattcacgaattttttccatctatttttttttcgggagtttagtctccttattaaagaaaatctctaattttgattcaattcacacacatatatatgtttgattcaatcagtgtaatatatattatgtgtgtgagagaggatgattcaatcataatgtgatataattaaaaattgttaaacttttaaaaattatatgcagaatggttttttttaattaatatatgtagaatgattttgaaagcataaaaaatctctacatgaatcaatttacaaattattatttatgtaattaataattacttaaattaaattaaatcatacctatagtaatactaaatcactctattattattattattattattatatatagaaaaaacataaatgtaactttttatttgtttttggtgttgctctcatttatgaattgtgtcacaatcaatgcaaactttgtttatttttaacataaacacacacacaaataatgaagtaataaatttaaaacaacaaagtatttgtatgtaaattatctaaattaacagacacacgcattcaaataaagagataaatacatttaaatattaaataaataattaaataatagtaatagtaataataataattagtagatcattactttttaaagtagaccactacttatttttatatattcattatatacatatattttttaaaatgtagatatatattataggtaaattattcactggcttaaatattaattaaatatttttgtctacaatatgctataaattacataatatttatggttttaattatttatagtaaaaaaattaagtttctatattatataattagtaaaagataataataaaaatggtcaaaataaatttaatattagctaatttgatttaataaaattattaatgttaattatatatcatatttagtaaatacataaattaataatattgaacaaaatatgtatatatatacacacacatatattggtatgtaattctataataattattaataatgtattgtaatgatcatagactcatataacaagtcacgcatttaaaaaatacattaaatttagtaaaattaatcagtacgtataattaatttaatattattattaaatctaattataaatcatctttaattaacgcaccatttaatatatttaattatagatgtattattattgtcattgtaatagtcttgaccaatattttagcgtctttttgtttcattatcaagcaaaacgtaacatgcattatatgatagaataaataagattcatttgtgcagaagttttaatctcatttaatggtggcaaaagttttacgttattatgaaactcgtttattggtgtacaaatattagagttcaactctattacaaacattaaaatcatacaatattttttcggtagaccatttatttacttatataaataaaaaatcaaatactttattacactaaattttaaagaagattttgccacataatcaaatacattattcacatgttgaaatgacacaaacggattaaaagagagattttacaaaagaccaatattaccccgtttcaaaaaaagattcaccgattaatattggatcccaaagcaagccttattatcatcttcagcaatttttctctaaaagaaatttattataaaaataaaaatattactaataggctaatataggtgccaaataataaattgtttattttcctttctattttttatttttttaatattttttattttaatatttcaattaatatatgaaataaaatgtcaacctaaatcaatttataaattattacttatgttattattaattaattgacttaaatcaaattaaatcagatctacaatatcattaaataattctattaattattactattattattagcaaaaacttaaaagttcatagataaattatgtcacatattaatatgaaatttatttatcattcgtaataatagttttaacttttaattatatttctcattagtaatatttttaataacttataaatataaaatctttaaatgaataatattgtgatcatgtgcatcaaaatcacagtaattttaatcttcaaaaaatatttcccctttttaaaactattttatatcaatttcatcattgagagaccaaatgaacgaatgaataataatttgatttaactcaaatgaaattcttaataaaatgattcgataaaaatatcagaacttaattataaagcttatacaaaataattaagtaagaattaaaaataaataaaaaatagattgttagtgctttatatacattttatcttaatatttatgaattttgatcaaattcaatttgaaatccttgtaccaaaaatgtaaaaatttgaaatcaaaattaatttgaacaatacaaaaactttaaatataactaattcacttaaatataacacacacacacacacaaatatatatatatatatatatatatatatacatatatatatatatatatataaagtcaactagatttgaaaaaatattaatgtaacatttatataaagaaagaattttttctttatatactatcataaatataatacaattttattatttaataatatttaaaaggaatataaacacatcaccatgcaattcttcatcaataaaatgatctaattattctttctcttttgcataccctcacacattcatgtatatgtaaaaccacaacgagaatgaaaaaaattcaaagacagtaaggtatgaagctataccgttaataatggtttaaaaaaattaattagtattacttatataaaaaaatacatatattttataacttatcactcaaaatctctacaatcaaacgtagttgacttaaaataattatgcaatatgtaacattctaaaaaaatttccgagaaacatattatataagattttaagtgatgaaaaattcttaccgacaagttgaataaaataccactatataaagtgttataatgtgaaagtcactgagatgctaacaattaggaatgttacataatacataaaagaaacaggacataatagctagctactcttttcaaaacaatttaaattaaaattaattactcatctcaatttatcatatcaacttttaaatttttaaaaacaccaaagtttttggaaaaaaaaaatcatcccaattaaatttctaaagaaaaggtcaagaaatagaataatttgttggtgattcatttttaatttttaatcaaagtatttttttataccaaaaacacattaatttcacattgaaaactcagtatacaaccactttaactagaccaagatgatcagttctcctaagcagcaacatttgtttttctttttcccttctgatacaaaataaaaacaataccgtgacaatgctcataagcatgtaattacaaaaacatttatatatctcacaaggaaataatcttcctatgtgaatgtgagtgctgtcctatcgaaactgcttcatgatcatgatcatgaaaaagtagggtcaagactccaactaaacacagcactgaaccaacaagaagcttgtcatatcgctccacccagtgaaacttcagctgactggccccataaaatgacaatgctactagcgaagtcatcacagttattgtgctgtaaatgcaatatgtgtaagcttggttagtaatgaatatctaaacaatttttatttgcaaacttaattggcatctaaaccagagtagcatcaacccagattaagaaactcggccttaaagattgtgaatcttttagtgcagaacagcattcaaaattcaaatacaagacagaaataaggattcctatatgttccatcaaccaacctgaatttcaaaaaagtagtcaagggatctagctgaattgttaaccatcttttttcagcttggatggcatctcaaaattcaagtagtttgtggtaccaaagagaggtttgtcagacatgatgtcttattagaagccttagcataagttgtcatgaaaaaaggtatacatgatgtcatgttaaaacaacttaatattccatgtatttccataccctgtaggaaaacgttcaagtgatagagtaattgttgacagaaaccagactaggcagtccaaccagtttaaccattaattggacacttgtccaattataattcagtctcaaaacataattgagggtcaaacacctttggaccaactaaaatactcaacctggtttaatctgtaatcacatttcctgaaaggttttataaatttgatattgtttcatgtgatttacaacttaaaactcatactacgtggccaactggtctaaccatgaattcgtcacttgtctgattataattcactctcaaaactgagtagatggtcaaacaacttcagaaaagttatggaatctccctattccctacctagtttcactctttggtcaacttttaacaacattgaatagaatttatttgattagtttctcaataatcaaaacaaattttaatgatcatgaagtataggatttcttgggagcttttgctttattcaatgttaaggtcaacatcagaatttttaatattgataatcactgacactttttccaacaaataacatatcactttaaataatcataggccattgtttaatacctgaatagtagtactatgatggcaagcaccatcatggaagaggaatttccaactgcaagaaagaccgggagtgttgtagcacaaggagacaatgcaggaacgagaataagtccagctacagccattttctccatgggttggttgtgtgaatgactatggccaccctttcccatcagaaacagaattatataactaccacccagaaatacaagcaaaagtgaagcaaccttatgcactgtttcttcaccagcaatggtgtttgccatggtaattgccgttataccaagcagtgaagtggatattacgtgcaaaattgctccaagtgcagctacatgaaataaaatgaataaggttaaaaaaacattatggacaaaatccaagaacacagtcttctgagtctttgcactagacatcatatgggaataagggcagatgcaatgggttggttacatatatgaaacagtggatagggctaagaaggaaattcagagtgctttcaatggcaacaaggacgtacaaagaaatttttgcaatcattggttgaagatgagagtgtcaacttcaacatccattgcatccaacaagtcattttctaaatcctaagttcttttatagctagccaagaatagctgatcatggagtgataaaagcactgagaagttaagttaaaatgaataaatcatattttaaaatgagctgtcaatatataagaaagctggattgaaagtagcaacaaggcaaaagactagaatggctcctaataagtgaaagttcatattttaaagacttaaatacatttttcgtccctgcaatttaacacttttttcattttcatccttacaaaaaaaaatgttttagttcttgtaaaatgtgtttgttttatttttcattcttaaaccagtttatatagcgctttgaacattaaaaaacatgttatataaatcactttaaggacgaaaaacataacaaacacattttgcaaggaataaaacaattttttttgtagtgacgaaaatgaaaaaaacgctaaattgcatgataaaaaatgaatttaaacctattttaaaagttaattacatgacaattcatgcaaatactaatgcaattaacttttgcactacagttgagtagcggaggacaacaaatcattgcaaaaacttgcaattattgagcttgacttgtagttagccagaatgtgagcataattggagtgcttttaagcatgtaagtcaaatatcaaatgatttaaatttgtagagtttcatttcatataacgattctgaacctaacgttttcaaaagtataatatagatttattcgagaagagaggttgcaagaggatatggaaaaattcataaccgcatcactagatttcatctttaaacagaactcaagtcattcatttgtgagaacatttattatcctttcactgctcactcacatccaaacagaagaaaagcacaatccctaaaccctgacaagattcgcgcatcacagagcaagaaacataacaaaagaagaaaaaaaccgttgctgacctaagttgcgcaattagagagagagagagagagagagagagaggaacgtaacgtactgacgatgagagtggtggagagagtccatttctgagcgcgaccgacaatggagaaaggaagccagtgagtgggaatgaaggaatggagaagcgacacggtggcgattccgccgatggtcgacagatcttcagcggtgaacccacccattgcccgcaaaatttggagaatctattgctcacaactcagatctactccacaactgcgaatcccctgtttctgtttcggattaggaccagaagcaccaaaatctgaataaagcggagaaaaagagtgggaaaagttatatatatatatatatatatatatatatatatatatatatatatgctattcagtaagtatttaatcataaataatgtgtttttctaaataaatcacaagtatttaatcataaataatgtgtttttctaaataaatcacaatttatatatatatatatatatatatatatatcacataattatttaattctaaattatttatcaggaatgacaaagaaatccgaactcggatatacttgtcctatctcatcccaactttgacgaaaaatactcgatttgactgaatatgaacatatggttcgagtattatttgggtgatttctttatgtacatgaatgaggatgggtaatcatatattcccgtatcgatcctcgacatctattgtggttattaaattacttttttattattacttagggttacacaatatacacttatacaataaaaaagtataaactctcaaactggtattcacactcattcactactcattagcgtcgctagctgccaaccctcgtctctctcatacagtcatctctcatgtcaacggtcatgtcgcgatctcgcatctttgaggtgtttgttgcgtcgctgtgttgttattccgatgaactctagtttgccatactcttcgttttacgtcgatcacacccttcatttcgcattgttggtgtcgattgtcgaaccacacattggtttcacaaacttgaaaggttgcatgcaaggtcgtgtcgcactcgcacgcactgtagtccttgaatactaacacaagaagtatgctttttgtttaacaatcacatgcacttcttgtgcaccatttataatatcttttttgaaattctcttagaaaaaactgttgcaaattgaaaaaacagaatcaatggactaaggatggggacagggcgggatacccgtccccatgggaacagagataggtgtaaaatattattcccaacggatcgatcgaaaataggaaaaggtatgatttatagaagcaaggacgagggcgggggacatcaaacttgttcccgtcccgctccattgtcatctctattatttatagtgaacttgttcgacaccaaaaatattattgttaatataagattatatcaaagaattaaattacataaacatttagtttgtttaaatttaagtaaaaaatacataataaaaataaattacataaaaatttaagtagaaaactgtttattttatgtaaaaccaatttaaacaaatacatcataaaaataaaaatcagcttattttattaaaaagtacttatattaaaaaataagcttaaacaaacttacttgaaagctcaagggtgtcttatttaagttccatttttatttatttttgttcttgaccatgctgaaacaattttatatcacttgatctacatgcttgataatatttatttttacttttaattataaaactgtcactttatatttaatctatcctattttcaaatatttgtacaggaaacaaacaaaaaagttattttcaatgtttgtttggaaatatataaaaaaaatgccggtaaacgcttaagagacatttctattatgatttttgatttattaacatgttgtacaactaaactcattattaaacaaaaaattaactcattatttatttatttttaatatctatttgacattgacttttatccttaatagaattgtatcattaaataaattgttaaaaaataaaataaaataattaattgtgtgaaattgaagtgacaagtttaatcatgaaagaagaggttgaattgtgatttttttttttttataaaaaattaccaacattaaactttaatgactttctaatcttttttttttcttatgctatggagttaatttggtgctctctaagttatcttcaaatgattattagattcgcaaaatgatgtatcttaacctcaaaagactcaaataatattactttgacaaacacataattatactgttttatatataagtaacaaaatggtaatgctttatattctaagaatggcgtatagtttcaaaattataatgattttatttgtcatatttggatcatttcgtccaaaaataagaaggaaataagaacaaaaataaaacacatctttatatttaaaaattaacttatatataaattaaaaaatcacttttgaataaattaatatgagaaaattcctacaaatgaatttatgcattagttacttttatgaaaatctttatttcaatttttctttcttttctcctgtaaataatactgataaaaaagtttatccggaaaggattactaaactaataagtgtaagagaaagaaagataagatgagtgctacaatagtacttcacacttatattatcatgtttggagttcaattgtcatctttatatagttattagttacatagtcaatgtgatattcataattgtaatgaaattcaaacatggattgtattaattttttaatttattaaataaaagatagtaatcacaaatagcaaattgcaatcaataaatgcactaatagctcatgaatgctcaacatttggttcaacttttaaatcatgtctatctgataagattatattttactactttcctcgttgaccatttgcatcctttttctcgaacttctatcaagcatgcaacaaaacaatgtatggtactaaacatgctcctcttcttcttttatttaaaattatcaataaataaatataacatcaaacgttcgattaggcatactcttctatttttctgatcagaaatctggaatgaaaaaaaacagcaaaaaacaaacaaacaaggagtttgtgactaacaaaatacttaatcacagcctccaaagcataataggaagatatataaaacaaaaaacaaatgttgagggcaccaaagcatatataataggtttttactagttaaaagccaaagcaaaatctttgcaatactgtctcgttagtttgcaacgtgatattgttctaacaaggaaccttcaaactttgtgtagcaagaatttggtttattcattcatctcgatcatatatgatcagagttaattaagattctggacacgtgattctgtgttgtcatgtacaaaacggacaaagcagaataaacaagagtgaagctaacattttctaaaaagtcaaaaatgtcaaattaatcaagaatgtatattttcgcaattttaaattgacgaccggccgcttcacaatttagtgtgtttagatgtgcattcatcaactttaattttaaatgattttaatcttataaaattaattttgtaaaaataattaaagtttgaaataaaataatttatgtttaaattttttcatctaaaaagtaatagaaatataattaatattttccgaatagtttaaagttcatataattaattaatgcctataattccgaaaagggaggagggtagtacctttgatattacgtactaaaattaggttaaacatggtttcatctaccgcaaaagcaattccaaggtgggtaggtgcaaattttggtttggacgactttggagagaaaaacatcatcaagtgatgatcataaacaaaaatttgtcatatatgatatgttaaaaccaaaaactagtcaataaaagctattgatgtttgttggattgagaaaacgtatatttcaaaaatgcattattaaaaccttctgattttttctctctaaatttagatggtaacaaacaaatagttgagggtgacctgcaaacatgataataccaaactaggtaggtagcttcacatgcatggaagagaaaatgtagctgtccttagttaatttgtctccatcaaaccattctatacccactcataagtcatttccttcaacatgcaccccattaatattaatattgtataattgtatataataataattcattacacatttatctttgacccaaatttgcacttatatttcataggtcagctcccaactctttgctgcacttaggcttctaacttggtgcattgactcaccatctttgctttgaatcgccatggaagataaactagcaacaacaagtgaaggacaacccataagatgtaaaggtgtgccatgccatgattcatgaaaaacaaaaaagtttatatgctcttttttattatttcaaatagatttttagctttttgaagttgatatttatgtttcatatgaataaatggtacttatttgttcttctttatttgcaaactgtagctgctatttgtcgcaagccaggttctccattgagtattgaggagatcatcgtggcaccaccaattcctcgtgaagctcggattcgtgttatatgcacttctctttgtcacagcgatgttactttttggaaaatggaggttattaccatcattttctttctctttgaatgatttaaaacatttttcttagtcaatgtcttcctttaccattttttatttactttcacactctttcttttgatctagatatctttctttttttagaagccttactggaacttcttaatgaattttttaagattttttttttttttttgtgtgtttaaaggtccctcctgcaatttgtccaagaatcttgggtcatgaggctgttgggtgagtgagtgcatgccctttcactctttttagttttataattttatttactggataatattattcattcctaaggaaaaagaatccactgtttattaataccctgtttgtactgtatctttctgtatcaacataaacttttgcgctttactttttaggtaggtagagtaaacttttgtggtttaatatataaatgtttggtcaaactttatgtggttcttactccctagtccttacagatgtggtttctacatacatcagttgtattaagttagggggcttgtctttttgggctctattgctatatcttttatacatgtaatggcttggttttgactagtttgtgctcaaacctttgctcttttattcaatacattttcctttcaaaagaaaaaaaggtattctgtgtaacaactgcttaaattgtttagaggcatctttgtggtctaactatcaggagtagttaattttctatattcaatcctagagaaaagattggatagttatgaggcaaattttaatgtttcaattttgatcaaggattaaataacaaagcaaagtgtgtctgcaaaccttcagatgatttaacaacagtaatcggaacattgatttaagaacaaattctacgactaattatatttatctttgctacctatttttgtgttggttgccaacaatttttagccaccttgagcccctttatatcttctgcatattatattatagaagctgatgatgatgttctagctaattttgatatgatccagggttgtggaaagcgtaggagaggatgtaaccgaagttacaaaaggagatgtggttgttccaattttcttacctgattgtggggagtgtatagattgcaaatcaagcaagagcaacctttgttcaaagtttcctttcgaggtgtctccttggatgcctagacacgccacctctagattcacggatttaaaaggagacatcatacaccatttcttgtttgtgtctagttttagtgagtataccgtggttgacattgctcatctaaccaagattgatccagcaataccacccaacagggcatgcctacttagttgtggtgtatcaaccggtaatttgcctaaaccatgcaaaattgtaaacattaaacaaaaagaatattgaagaactatatcagttgcataataagaattatagtcagaatatctgatcataaataaacacatgattgttttcacattttagttcactactcaacaacattcatctaattcagtattttgattaaactttcacttttaggggtaggtgctgcttggagaacagcaggtgttgagccagggtctacagtagccatttttgggttgggaagtattggattagcagtaaggaatccacatagcttttttttttttttgtgtgtgtgttttgtggtttattatactcaaacgctcattgcaagtgaatggtttcctaggttgccgagggagctagactttgtggagcaactaggattataggtgtggatgtcaacccagaaaaatatgaaactggtaatgcattatctgcttaatgataatgcttaaataaatttgttttgtatcattattgtgctcaaattatttaattgattttgtgggtttgttcctctgatttactcaggaaaaaagtttggactcactgactttgtccatgctggagaaagtgaaaacaaatctgtgagccaggtctaccctcttctaggctccaatatttatttaatttagttgccttaagtcttgaaatttccttctcatatgtgctttgtttagcaggttatcatagagatgactggtgggggagcagattattgctttgaatgtgttggaatggcatcattggtgcaagaagcatatgcttcttgtagaaaggtctatctcctttctctctctatccctctccctctatctatctatctatctatctatctatctatctatctatctatctctcaaagtgcccctaaacatgccttgcactatggttaataggcagacagagtaatgtgattgaatgaataactgcagaataattttaaaggatcaacctagcactagtaatagtttttcttttgtgctaactaatttgaaattcctggtacttgatgaaaatgaagtttgctgtcaaattgagacaggtttgattgtaaattttaataataaactcttatcagatgcaaacttgttgaatgttgttaaaactgatgctttccctacagggttggggaaaaacaatagttttaggagtggacaagccaggatccacgttgagccttagttgtaatgaggtcctccatagtgggaagagcctcgtggggtgcttatttggaggactcaaacccaagtctgacgtacctattctccttaaacgctacttggacaaggtactttgtgcaatttcttttaaattttttcagtctatgctcttgatcccttctgctaacgtagtgatgattatgtaaaataataatgccataaaaccaagttttcgggatgcttctttttagtaaatttcatctgtaattatcaacaggaactgaatttggatgagtttgtcacacatgaggtggagttcaaggatatcaacaaagcttttgatttattgattgaaggacagtgccttcggtgtgtgatttggatggacagatgagtccattcttgtaaaagtaattgttgctttgagcaactgaattatgacatcaacaagtaaaatgttggatgctgctcttattttgtatttgatgaaaacatattcaattcaatgtaaaagcagttgataccccaacaaagtaattgttaaaaaggttgattatcatcatcaatgcttaaaagtattatattatctgtttccctgaaacagcatcgtgtagcagttcccattttttttgtgacaaataatcatgcattgaatattatcaatttccatttgaaaaacaagcttaggccataagtgacaaatgacaatccaccacaatttcatcggtaacatgcttgttttatacatttatactatttttattttattcatccaaataatatatttttctatttatatctttattatttctttatcgtttaatttatattgttccctacctatgttccagctttatattttttctataaaaaaatttaaattttaatcatttacatacacatataagtttatttttgtggttaacatcgttactgaagtgattggcagtgttgcttattaagactactataaactttttctaaccatgcaaaacagcgacaaatttttcgcatcatagaaaataaaggaaatcacaatctacttaaacctatgtcattctcaatttcctctggcatatattgatacgcaaatagtttatttgaaataatgtcaatgattgcattagttgaatctggatcaaggtggtaataatacaatcatcatcctagagtatgaataacttatcaaaattattaaacaagccaataatgcaaaaaaataaaaaaatcagcctctttcggtgaatctgttacactatctatatatcaagacatttccgaagtaactgagaatataataagtttgaacacgtcgcaatttctcttatttttctgctgtgaaagaaattttaattttaacaattttgtactgtaagaagtatcttgtactggtgtattttcagtcacattactgatgatattaccagtagaaatcaaaagttaattcatatgaaatatgtaagtgctaaagcttatgattttttataaaagaaactgtaaagtgagattagagagagaaataccaataaaaccttgattttttttagagcattgaagatagagttggaatcatgtcacgccagaacttatagaagaacagtggataatagtttagataaaaaaaaaaaaaaaatgaaccacaaatcatgcacaatatatggcagttaatacctgtctctttctctagtttggaaattcaaagttcccatttaattttccagttatcacatcagtaatgcagaaacaggacctaattgtttatttttaaaaatttcaactttaaaatagaaatatataacattaattaatatataaaaattattaaaaaaattagaatcttgtataataatagtaatgtcacagtagaagattgattcctcaaaaactagataagaaaggataacacaaacatcgaactaaaacgaccttttttcagaaatttgtgggtgcatctaaaacttttacttcataatcaacaaacaactatttatttcttttttatcaactcatcaaaatgagactcataatctactatacatatataaaaactaactgctagcaaaattacaaaattggatatcctatgtttatgacacttggtaaaaaatggaggtaaaatggtaattgaacattaatttgctaattgcacccctttttaataagtgcacttgaattaaaacttgctaattgcatacccttttttataaatgcattccaatattttcaaattagaattcccaaattaaaacttgctaattgcacacccttttttataagtgcatcccaatattttcaaattagaacttgctaagtgcatcccctttttgataaaaaaaaaatctatatttctttcatccctctcacacgttatctctttaacacttagtcagtcgtactagccagttacaaaaatataaaatctcaatattattttaatttttcttttcggaaaaactctgaatcactgatgatatagtaattcctctcttatttacttaacaactgtctaaaaaagtgcagtaatttcctttcattttatgttatgattttcataatctcctactttgggtccttcatatttctcaatattgttggttctcatctcaattgacttagtctacttattaacatgtttgcacaggcgtaataagagatggagtcttaagtggattcattgtttaatgtttgatttcaacagaggtgtattatcacaagaagaataaattattattgaactccacttttttctttctcttattaatttacttgacaattgtctagagtgcggtggtcttctttcattttatgttatgatttttacaattttctcttgtggtcccttcatatttctcaatgttgttggttctcacctcaattggctgagtgtaattattggcaagtttgcacagagataaaaccttaagtggatcaattgcttttggcctcatttcaacagaggtatattatcacaagaagaaaaaattattattgaacttcacttctttttttctcttatttttgttgcacatccattttgtcattaataaaccatactagatcttgcaattttttaaatatcttttccgtctagatgatatgttgtcttaactacctttttaagagttaggtgtgtttaaatatcttccttatcatcttctctcttttctcaactctgaaacattcttcttctttgatgttctctattttctcaccatttttctctcttctcttaccttcttcattcattcaatttattttctctctcttctaaaaataaaccagtgaaatatctttttatttttccgttaaccattcaacatcgcaaccctcgttgaaaatgtctttgccatccactgtgactacaacttcttcataattttttcatgatttatagtgatctgtaagcaatgaacaattttcttagtttctattttcttggttgattttggtttgacctaattactttctttgatttttctccttcatcaaaatttctttaatattgtgaatatgaactaaatttgttaaaaatgtttatttgatatggcctatggattaaaatattttgtgaaaaaagatattaacaatagtgccttccaaatgaaaaactctccggattctaagtccggcgctatccgcaccacaactgctctggaaagtggatcttctctggatccttgcgctatctgcgcgggacctcgatctctgcagaaattgaaagttgctgagggcaaacttggagtttcacctccctaagtataaatactaaaacccacagctttgagaggactcttggatgaaatttcactagaacaaggctagagaaagcttgggagcttagctagggcttggagttgtgagtgcaaatgggattcttcccttcttctctaccttctccttgcttgtgtatcagctgggcatgcttctttttgatgtaccaaggccagccatgattaggtttggctagtttcatttgtagctagggccaaacacttgatttaaacttccattggaatgtattgaatgctattattcatttatcaaaagttattttactgcactttgcttgaatggtttctatctatttcttagacttgatcaatcaaatgaagggttaagagctagggttcacaataggaatattggggttctagtcttggaactaagtgtagtgacttgcttacattacctaggaataggagtttatgtttgtagcttattcaaagtgtttgcttaatgcttaaccctaaaaaggttgctaagggattatgacttttaagagggttaaagggttatttcactaagggattggagagtaactaatacgtgatgaaacacaatcgctaagtaacttagataattgaatgtagtaagcaatacgcatccattggaaggaatcatcgagtgtgggtgccttgactactcttcttccatattgtcattaatttagctttgttgtttataatcaatagttatgttttaattctagtctttacttttacttactcaaacaaccaactcattcttttaccaacatttatttgtccaacttatagatacgagtcacaatataattagtgcatcaatcctcgtgggaacgacaactcccttatcactttattacttgaacgaacggtatacttgccgatttcgcaacagaagcaaaaatgtcggtgtacttggtttgtacaatataattgtccctatttcataagtctccatctgacgtttctatattcactttctctaaactttagtcatatcactcatcaagttagttttcacttagcatatttaatatttcattgatcagctcccaaatcctctatacaattacactaacacgttgcattgcctcatgtgttttggatagccatggaacacaaagtagccacaacaactgaaggacaacccataagatgtaaaggtgtgtggtgtgccatcattcctgaaaacaaactaatgttgtctctgctctaccattttcttgtttgtagtaatttttaatggctttcttaattgtatgtcatgtttcatatgtgtgaactctatctgttctgtttcatttgtaaactgtagcggcggtttgtcgcaaacccagtgagccactgagtattgaggagatcattgtggcaccaccaatgcctggtgaagctcacattcgtattatatgctcctctctctgtcaaaccgatatcagttttcggaacatgcaggttgccacttgacaccatttttggtccctctaaatgatttattgtgatttggaacatttttctcagccaatgccttccctataccaccttttcatttcaattcaattgctgtagaatttagataactttttcttttggttctatggaaatttctgaaagatttttttaagatgcattttctatgttttgaaggaccatcctgccatttatccaagaattctgggtcatgaggcaatagggtgagtttatgcattttattttgcaccctcttttctcataaggattccactaccttgatggtatgctaaatgcgtatgcttttcctgtatcaatataaacttttcttcttttttcatttttttggtagagtaaactttggtgctttgatttttgtttacagaaaatttattgtagtctttactcctcagaaaaacagttcctatcataagttttggtgcctttttcgtttaatttcatgtgttttctgtgttacatatgcacttaagttgtgaagagccaactcaagagtagttaattttttaaatccagcttttagggagaagaatgaataactatggtcggtgagacaaatcgtagtgtttcaaatttcaatattgagcatggattttattaagagagaggcatatctgtaagcctgtttattattcaatgacagtaatttggccattgatttattaagagattctacaactcaatatgtttaccccttttgtcttcctgttggctgccaatgatttgccaccttaagccccattggatctacttgttcagacatttaatttgatactataggagctgttgatgaattccagggcttttttatgtgatccagggttgtggaaagcgtaggagaggatgtaactgaagttacaaaaggagatgtggttgttccaattttcttacctgattgtggggagtgcgtagattgcaaatcaagcaagagcaacctttgttcaaagtttcctttttgaggtgtctccctggatgcctagatatgccacttctagattcacagatttaaaaggagagattatacaccatttcttgtctgtttctagttttagcgagtacactgtggtcgacattgcccatctaatcaagattgatccggtaataccgcccaacagggcatgcctcatcggctgtggtatatcagcgggtaatttgcctaaaccatgcaaacattaatatagagaagaactatttgttacataatactacctctggtccttatattataagaaacaagtgatagtgtaaattcttataataaggaccggaggtagtataaattttggttataataaatacaaggggttgtttttacattttaaatcactactcaacaacattcatgaattcaatatattgattaaacttccacttttaggaataggtgctgcttggagagcagcaggtgtggagccaggggctacagtagctatttttgggctcgggagtattggattagcagtatggtgtccgtttagctctgttttctttcggtattttgtgattaactatattgaaatgcacattgcaagccattggtatcataggttgctgagggagctagactttgtggagcaactaagattataggagtggatgtcaacccagaaagatatgaaatcggtaatgctttttttgtttaataatatcacatcaagcatttccttaagcagtaatgtttaaataaattcttgtctatgttattattgtgctcagattatgtgattggtttttttggtttgttcctcggcttttattcaggaaagaattttggactcacagactttgtccattctggagaatgtgaaaataaatctgtgagccaggtctaccatcttctaggctccaatcttaatttaatttaattaattgcctcgagtccttagatttcttctcatatggggttgtgattcaggttatcttagagatgactggtgggggagcagattattgctttgaatgtgttggtatggcatcattgatgcaggaagcatatgcttcttgtagaaaggtctctctctccctcaacgtgtgcacaaacatgccttgcactatggtttataggcagacagaataatgcgattatattgtaaaacaataactacaacatgattttctactatcaccctagcacaaagcttgaaaatccactaaaagtattactagttttcttttgtgctaactaatttcaacttcctagtacttcatgaaatgaagtttcccttcaaatttgaggtaggcttgattgtaatttcttaactgatgcatacttgttgaatgcatgaattgttaaaactaatgctttgcctacagggtcggggaaaaacaatagttttgggagtggacaagccaggatccaagttgaaccttagctgtagtgaggtcctcgttaggggattaactttctacaccattcatttttccaatacacccaacatgcacagtgtaataccaattttacccttctcataatccgtaagttgcataccaacatacaccattcgatttcatacggatcggcaatccgtaagagtcatacggatcgacaatccgtaagagtcatatggattggcaatccatatgactcttgcggattgccgatccgtatgagtcatatggattggcaatccatatgcctcttacggattgccgatccgtaagagtcatatggattggcaatccatatgcctcatacggattgccgatccgtatgagtcatatggattgccaatccatatgactcttacggattgccaatccgtacgagtgtttccagctacagtaataacgccagaacttacctccgacgacgattccggccaatgaaacctccacgactgctaacaacgacctctacaccaaaccaacaagccaacaaccacgaagaatccaagctagaaccaagaacaggagtgagaaggaagatgacgcattcagctggtgtatgcgaaaaaaaacaaagcaaaacagacaagggcaatattggcattttgacaaaagtgttgggtgtatgggaaatttgcctggtgtgagaagttaaaccccctcgttagtgggaagagcctcagtggatgcttatttggaggactcaagcccaagtctcatgtacccattctccttaaacgctacatggacaaggtactatgtgcaatttcttttacttaatcttttttagtctatgctctttgtcccatctattaatatgtgtaaaactagtaattagtaatgattatgtaaaaataacaatgacataacataatagcaataacaagttctggggatgcttctttttatcaacaggaactgaatttggacgagtttgtcacacatgagatggagttcaaggatatcaataaagcttttgatttattgattgatggacagtgtcttcgatgtgtgatttggatggacaaatgatctcattcttgtataagttattgtttcgttacttaagcccttgaattatgacataataagtgaaatattggatgttctttttttgtatttggagaaaacatattcaatgtaaaagcagttgatgcccagcaaagtaattatgtcaaataaattgatggtcaccaacaatgcttcaaagtattttactagtatctattttctgtgatgactaatttccattgtaaaagcaagcttaagctataattacaatgatcatgaatgacatgtattccattccacttgacgcggatgcttaatcgaatgtgtctccgttatatggtgaaatcacataatactacattacatgtattcgatcggcaccggagtgtggtggattctacatacgcctaaaggttataaacctaaaatatttacattgtgacacattttgtttggtaattcagggaactcccaaatattatttgggtgccttgtaagcagaaggtctgacttatttatttcccttcttcctgaataataatgaatattgcaagaaaaaaagcacaaaatattagttttatcttggttcactttatgaaattaaccagtacagaaagttcaaggcattttgttttcaactatgcttcaacattcttcatattggcttcctgcaaataacagctagaaaataacttagtgggatttccgaagtcatagtatcaaactctccatgcgtggtgtttccaacactttagatctcaccaagctcccaatggtattgacgaaaagcttagcatcatccaacactctcccacgtgccaacttcttatacaaatagttctcaaacatcatgcgttgaacatactcatccccacacagttccaccagagccttcctggacacgttactacgtagaaaaccctctgcagcatgtgcgggggagcggaggaaggagtcgaagacctcgcagcggagcatggcgatgaacttgtggggttttagggttttgcagaagtcaacgatgatgttggaaggggagaagatgcgcatgaacgtcacgtggcggtcgatgaggtggtgaggaatgtcaaactcttctagcatgcagagagggatggcgcgccgcacggcttcacaacggatgctgggttgcgttcgaagaggaaggtctcaacgccgtcggaggctagggcctctgttgcggagaatccagcgaggccaccatcaatcactgtcgcccggagctttcggccagagatggatttggagcctgagacggtgaacgagtttacgtaggcttttgaggttggaatggagaatgtagataaacaaaaattagcttgaattttcgcagccatggagagagttaggattttggatcaatatctgtgaattaaggttttctagtttgttccttccatgtgttttagtaataatatattaataattacattttctttagcaaagttgtatattggttatttttttcaagttcttatttaatattgtaaatgcatagtttaatgtcgatatcaaaaccattttgtgctgtgtgattctaataaagaaatgatttccaaagcatacccaacagtgttgcagtgcggtagcgccctatttctttaacttttttttttactgctaccccaaaatgttctgaaacttttgtttatgaaacgtgtatatttgagagttttaggtagtgtaaatttgacatcaccaaggttagggtgtttatggaatggattttcaaaaaataattcaaatccaattaaatgaatcggatttaaaatttatattatccacttaagtgcataaaagtagtttggatttttttaaaatcaatttaaaatggttttgaaattagtttatatttcaaaactatttttgttttaaatctaattttaaatcataaatcaattttcaacctacttcgattagggttgcttttagctggccttgatcgcaactattttttgttaattttctgttaggattatttttggccaacattaatattctattttagatcaatgtggaactattttttgttaaggttgtcaatgtcagtcgataattttttttgacgaaattaggtagggttatttttttgttgacatagattaggattttttcaatcaacatcggttgtgactatttttcagttgactttggctagggtctttttcactctataacaatcagacttttttttgttgactttggttagatttttcaatcgacattagtcaatgatatttttttgccctacattgatcgatcttgatttttgtcaatatcagtcaagactattttcgattgacgtcaactaggatattttctagtcaatgtcaatcgataatattttttagtcacatcaactaaagctattttggagggacatcgatcaaggctatctttttgccaatatcggcttgagtcattgacgtatcaatccaagttgatcaaaaatcttaatcgatgtcaaccaaaaaactcctaaccaatattgcttaaaatagtctcagtcgaaagactaacatattgttgaattcgtgttttattttatatctactgccgtattagtatggcttctagtaaacaataaaacaaatctagcttgtttggaaaatctaatacacactgattttgttgtatgttcaattgcgaaaatctaagttcttcaagaaaactgtccaagtttgttcctaataaaaatgtccaagtttgttcctaataaaaatctgattttgtgatgatttaaggttggacgcgtgaattgtcctcaatgcctttgcaggattcgactaattagacaatttatggcaaataaattgaacttaaaacaaaattgattgatctctaaatttacttatttgcacaacaacttgaaatagatcacttgataatattgagatgaaatttcattacacaaacaaataagataaaaattacaaaaacaaaatacatatatactgataaacacatataatacagaaccatatgaaactaatgcattccttgtcaattagcatgggttctgttatttgttcttttcaacttcattaattaagcacaccctcaacaagtctcgcgagccattgtggtttcccagtcatgaaaacattatatcccaaaagcattccaaatagcaacccacatgcatatcccgctgctacagcttaatctcttttttcaatctcttcaattttctttatgttagcttaatctcttttgttgaggttgactagatttttatagatcatgttaatctaaattagaggtgattaataaaattttgtttgaagtgtgaagtatttccaatctttcaaatgtttgaggacaatcatttttgtttaactttggggtatgagttggccaatctaacctacttatttcattgttatcattaattttgtatactcatgtatgatactaaagagggaaaaatagttgaaaaaatacatatttgtagtatatataaataaaaattataaattttctcattattaataataaataatcaattttatcaaataatatattaaagagataaataaattacttgaatcaagacacgtcatgtttatttaaaatagtatatgtcaaatttcaaaatttaactgagatgaacaaatattacaataatttttaaatatattttataaaaaaatctttgttttatatagtttatgatttaaaatcaaaattttaattagattgaattagttttaagtagttgtatttaaaagggatgaaaatataaaaatatttgggctaaattgtaattttggtatccttatttctaaatcatgacatttagtttatctattctttgtatatgcaagggtgatgctgcttacaattttcttccccattacctactctagtgtgaagcctccgaacataatgcacagtaataagaaaaattattaaaatatatagttaattcatttagttaattttgtaaacattattttgtatgtatcattcataaaaagttattaattattttttgaattatacaaatttataaattttaaaaatatttaatatataaattttttattgttatggttattatttatttatatattttcagttaagaaatctcccaatggaacacattggcctgggcgcatctacaatcatcatgcagcaaattaaattaatcaaaatttctttgtcattattttagttctccaatgattttatgactaaattaattctatgccgatatcttttttttttttttccaaggcagtattaggataaaccattatgtcaatttccgtatcttaatttttctggtaaaagaaggtttcatctcaaaccattatgttgttgaattcctgcttcattttatatccactacggtaattagtatggcttctagtaaacaatacaacacaaatccagcttgcttggaaaatctaaaatacactgattctcttgtactttcaattgttaaattgtaaatcctttaagaaaactgtatgagtttgttcctaataaatgctgatttttttgtggattgaaggttaaacgcgtgaattttcctcaatgcctttgcaggatacaagtcagacaacttacggcaaataaatacataatgataaacctacataatacagaaccatattaaactaattcattccttgacaattttctgacatatagcataccttcaacaagtctcgcaatccattagggttttccagtgaataatacattacagcccaagaacattccaactagcaacccacaagagtatgaagcagagagctaagatgcagccaaaagaaaaggaagactttggaatgatgctagaaagtaaccttaaggagctaattaccttgtattaaaaattaaattatttttattcttatgttactttcattttcatttttctttttttcttttctcagtagctttgatgcctgaacaacattcatcatgaactaattacatctgaaaatacaatgatacaattgtacatttaattctgttagcctaattcttccagaaaaacagtacatatgttcctaatataatgccaattgtgtgtcgattgaaggttcaatgtgcaaattttccttgatgcttatgcaggttaccctagataatttacggaaaattagttacttgaaattaaaacaaaagcattcatcacattttttttcttcttatttgcaaacaacttcaaatagatcactcaggagaggtgagatttcttccacaaaagacaaaagttaaaattacagaaaacaagacgcatcgcacgaaagaatcatattaaatttatttttatatcattaaaatccatcataaataaataattttaaaattcagctaataaaaagtgtttcagcatatttttaatatataaattatattttaaatttataatgaataatttaaattatgatataatattatttttaaatattgataatttatttttataagaactattgaaattcaaatttaaaatagtgataaaagatggtagatgaaaagagacaaactattaagatgtttaaacatacaaatacagataaaaaaaaatgacagtttgagatgttttaatttaccgtattaatgtgtgaaattcacatccagtttgagacgtttcacgtgaacaattttttttaaggaaaaaattacgtttaacaaatggatttaagatgccaaaatggagtctgtaaaactctttggcagttgtgaaatgctagaaagtccttttgacaaatctttaatcattgagtgaattttacgtaaatcccatcactcaaattttgtaatagaattcacatcaaatttagtcaataataaaaaaaatgttaaataagattatattgttagtattgctttttaaaaacaattgaggtacattatctgattctaatgttacctcaacccttaatttcaagaacatgcttacccgctggtgcctttgtctagaaattttttaatgcatatggatcagtctttccagaggctgcatcaggatcaattatcaacttcaatatctgtttgtagaacagagagttgaaagaaggttttaactcaagcgacaatccatttgtatgcaaattctccgtcttttactattaaatactttgtttcaaggatagcctttgttttggcaaataagaaatcctactctttctggttggagttttggcataaagtcctttcactaagcaaaaacataccgatcttaaactaatggacttttctgtagtgctgttagtaaagaaaaagacagaagacccacagaaccttcatccgcagtaaattctaaaactaccgaaaggttggttttctacttcttttctcagtagctttgatgctgaacagcattcatcatgaaccaactatatctgaaaatacaacgatacaattgtacatttaattgtgttagccaaaattcttccagagaactgtatatatatgttccgaatataatgtcaatttacggaaaattaattgcttgaaattgaaaccaaagcattcatcacaattttttttcttatttggaaacaacttgaaatagatcactcaccagagacgatatttcttccacagacagaagttaaaattacagaaaacatacagacacacacaaaagaaccatattaaattaagagtaaactatttccttcccctatgatttgtcctttacactgttaattaattaagcacaccttcaacaagtctcgcgagccattgtggtttcccagtcattaaaacattatatcccaaaagcattccaaatagaaacccacatgcatatcccactgctactgctttccagccaaatcctgattcttcatggtgaaatgttgaatgtggcggcctttcttcatcctcattgcaggattttgacaaaggggatccacatagcattggatttccaacataggaatcattttcaaatgtgttaaattgtccacctgtaggtatgattccctcgaggtggttttgtgaaaggttcaacacagccagaaaattcaaattggtaaaagccacaggaatctctcctgttaactggttccatgaaaggtccaaccattccaaatttcttaaattaccaaaggatcgtggaatggtaccagtgattgcattgtgcgaaaggttaagccctatgagagaatgcaattctccaatgactttcggaagttctccttcaaatatattatttgataaatcaatggttgtgaaaatagttaatatcctcttgagctccacgaattgacctttcattacaaccactactgaatcattatagaaattggcgttacccatatatgtcaaaccagtttggttgtcattcacactcaccattccttgaaagttcttgatgtatgatgctggcaagggcccactaaaattgttatttgagacatcaaaaattctcaaactgggaaatgaatgcttggcaccgaaacaagtgatgacaccatgaaacttatttgatcgcaaactgagtacctgtaactgctggaggctttctagccaatggggaaatgtatcctctatgttattgtctgtcaggtccaaaacttccagctttgtgcagtgggccaaagaccgtggtaatggtccatccaattggttgccattcaactttatagtctccaattcatttccgtaataagaaaagttcccaggtatgttgccgtaaagtttgttgttttgcaaatccaatgcgaaaagagaaggcaatgttcccaggcatggcggaatctggcctgtcaagttgttatgagccaagttgagtatctggaggtatcttgcatcgcacattgctgaaggaatgttcccagtcagctcattatttgagactaaaaagctctgaatggcattgggtggaattgggagatctccttgcaacttgttgaaactgaggtcaatatacatcatgttattccaggagtgcaagagcttctcatgaaaccacgggggaatgcttccacgaatgttgttatgagaaagatctagtgcgagcagattttgaagtggtgctaagaatttagggaaactattaatattacaggaagataaatataagtgatcaaggtggggtaagatgtagtcagcggtactatcaacaataatagagagaaaactattgtcagaaagatcgaggtgatttagatttttgaactttgaatcagcggtactatgaaagtgaatagagagaaaactattgtgagaaaaatcgaggtgctctagatttttgaacattgaaaattgattaaagtgcagatgaccactcaagtcaattgaccctgtgaggtggttgttgctaacatccaaccatgccaaggaaggcaaagaataacaccaatatggaatggggccaactaatttattaaatgatagatctaaaaagaagagttgagttagattaaagacggatgagggaagcagtccatcaaaattgcaaccccccagagatagtgtgtcaagagacttcaaatggccaatggaaccggggatgttgcccgagaaagcagtatgagagagatacaagtaacttagtggagtactccagtttgactttggaagttcacctccgaggtctttattatcactcaaatatagtcgttgaagattgggtaaacagaggatgtcactggacagattcccttgcaatttggtgtcttcgagaccaaggaggatcaaagaggaagagagattggttagcaatgacaaagagctctctccgatacaagacatgtccacgccatctaaattaagctctcttaaattagttgcgttttgaatgagcttcttccatgtgtatggatcaattcttattctcgggtggttgggatcatcatttatattgtagagatcaagtgacagtaatttggacaagtgagagattgtggagggaatgtcaccaaaaaaatgattataggataggtcaagaccaatcacgtggcctgagatgatgtcgcactcgaccccaagccactcacaacaatctgttccgttgttcccaaaataataatttggaatgttgagtgagtatttgagttgtagcaaggcagagctgtcatcatggttgcagaaagaggaagaagaaggaagaaaaagaagaagaagaagaagaagaaggaagagaaagtaagggagtagaagccaccaaacattcttattcatattcatcctttcaactcaacaacaaaactagagagtattttggatgcaaccatttcaattcacgaacttctatttatagcctacgctgcttcaaagcctttcatttcgatttaactctttctttgctttttcttccttcgcctgtgatataataatatatttgtaaatcattatcaaattaattttatgttattcagataattttttatattgccaaccattaaaaagtttaaatatttataattttgctactaattgattcttgtaacaatgttaaagttaattatagtttcctctaaatgttatattttttactttatttatagtgtttttggttaaggaaaatgttaagcaaatcactctacagtgggtgatccccatcaaacacacatgacatggattaaaaaaatattattttattattaaacaattttaacgaaataaaaagtaaaaattagaagaaattttttaaatcaaataaaaaagaatgaaattagggaaaaggaataagaagatccaattattgtggctcctgcacaaaatcacctcttctccttcacaccctaatgaaggtgattttgttactttcatcaaaggtgattgatatgtggtcatcattgtagttgtatttgtccctttgttattgcattaatgaaacccaaaatttattcttcaatcatttttgctttgaacattggagggacaacttcctcatcatgaaggttgtttaacgagaatgagtgcatcagtggaggttgttggtgtgaagcagtcattatcgctgcattcgtattcatgtgactattggtgaaatcaaatcctttttctttaaaatatgataattttatttagtctttaagagaatatgtttattccatggattcacaatttcataattttcttcataatcttgggatttgaatcatttactcaaaaataaccatatctaaaaacactatagaagaattcgaattataatacaaaaacatattaattacaccaagagttgttgtaaattgattattaaacataactataacaaataattaaaaggttactaaaattgtctacttcttctttttttttttttacttttacaaagagaaatatttaaatttattgcttcaaaattttatttgatatcacactagttttctttttcaaaaaatctgttaaaaattatctcttaagatttcttcgtcaccatcttagttctagtctatcgtccgtaaaaaacaaaaaaagtttagtctaatatcaagttaattcctcaattttttatgtaactacttttttcatttattttgttatttttctagttcgtattttttaatgacaagtaacatgtttgataattctttaatagaaacttgtaaaatgattatattttatttttgtactttgggtcacaattatattgaacggggcacaaaaaaaaaagagtaaccatttttgaatattttatttttgtaaacacaaaattaaccctcattatttttgtctctattttttttgtattacatctttcttagtagatgtcatgtgttaactaacgttttgattgagtgtccaaaaattatttttgaataagagaaaatattagcttaatcaaaactaataaagaagaatttgttgttttgagatttaatttgttgttttgagatataaggtacttttaaactctctctcaatgatatccaagcataaactaagaagttattattattattattattatagaatttttatggcacctctataaagttaaggaattttggtagtaaaacaagatattatgttagactttttattatttatttatttgtttattatatctctatatagtcctgtcatttgaaacggaactagctaagaagaaagttaaaatgcaatgagcactcaatatcacatcaaagacgaagacgcaatagtgataaagtaaacagcgtgtcaatgcattattagttacttttaatttttgtttcagatatacaagatgcttcatacaactttaattctaaagttgcaagaacgttaaatcatgaataatgataaccatcgacagtttaaaccgcgtaaattgtggttcgtgtatattttaagaaatatttaaatatatttttgcataaatatatgtttccaaaaatattattatctggagcattattttatataatatttttatttactacgatgatgtcttacatatttttcttttgatcttttttttttaaacaaattgacttaattatttttatgatttgcactcttgattttggataacaaaaaattgagtgaaaatttttaattacaatagaattcttttgtatttaatttatcgtgttaagtttcaaacatcattaaaaatgttttaacagtaaaaaatgtaattaaaaaatgtcatttaattttcattgtgattgaaatggaaggaaaaaataaattatattaatgttaattatttgaattgatacttcacaatttgattaattttaaattaaattattttaaaatttaatttcatatatatttgcattatgatatctttcctttgaaattgaattatttccaaaactatattaaatcattttccacataaattttgtttttagttttacaatgattaattctattttaaattaaattagtttaaaaaataatttgttcattaaatatttcatgaataaatattataagaaatgaaactttattaaaatgaataaatattctttgtgattaaaattcaatcaaatattcatggagaaatattttttcatcaatcatacaatcctgtataattttcatttgcaaagtctaaattttcgtatgataaaaaatattattaaataattttatataattattttataacaattcttaaatattttcgtgaataaatttcataagaaatgagactttattaaaataaataattttttttcatgattaaatttcaaccaaatattcatggatcggagggatatattttcatcaataataaattcctgattaaatttcatttgcaactaaattttagtatagtaaaaaatgttattaaataattttttataattattttataacagtcgttaccacggataccataatttgacgtattattatggaactaaaatatacataaaataaaaattaaattcatataatagttaatgtaaaaaattaattgcaaaatatttttttattaattcgcctgaaagaaatatattataataaaggtaactataactattattaatgaataaataaaaaaatgatattgattacatttatcattaaatttattattttggaagaaataaatacagaagcgtcacgtgatatccttccatattatacagtatattgtattagtttttttttaaaaaaaaaaaagttgtcaaatcaatctcttaaaaaatttcttattcacttttctccaatgattttatgcctaaattagttttaattaaatctatcatcaaattaatttctgctacttttttgttattgctttgttcatttaccttgtcattttcctatttcaaatataagtcttgcctggtcaaagacgtgtaagaaagtcctaaagaaatgacaagtattatatttagcaactttttgagttttgctttctttaagacttaaagacactagaaaccccctataaagaattataaatgataagtattatgcttgacaactttttagattgccttctacacggtgagtaaaataatattcctaaaataaacaataattactatgggtagttattgtcgagtcttcccttcatcaaaacgttaaaaaaaattataaggtaaataacaaaatattccacaccagttcaaggataatgaatgagaactttgtgatcgtgctaaatgcagttctatggtagttccttgatatcaaaattaggatgttagctgtaattaaggactttgtttctcaaattaattagtgtgagtttgaatctggatgtaataagtagtaactcatgtctctttaagtatctatatataattctttttttcctcttcaatttttttttatattaactaaatcccttttgttgaggttgattagatttttacagatcatgttaacctttaattagaatgattaataaaattttgtttggaatttgaagtatctccactcttttaaatgtttgaagacaaacattttgtttaactttgggatatgagtttgccaatctaatctacttatttcattgttatcattaattttgtgttgagataaataaattacttgaatcaagacacgtcaattttattaaaatagtatgtcaagtttcaaaaattaattgagatgaacaaagattacaataatttttaaacatagtttataaaaaaaaacatctttgttttatatagtttatgatttaaaatcaaaagttaaatcaaatcttaattagaattaattagttttaaatatttgtatttaaaagggataaaaatataaaaagactcttggaacgcgattgcgcggcatagtcgccggtgccgacggctttggccacccggctattggagccatcggcgccgatcacgacgtcgacggatagggagtggcgcgaggagccgttggtggtgtagtggacggtgtagggccgtccggcgctgcggggaggtcgaggccggagacctcgatagcgacggcgacgtgcacgcgggagcggaggaaggagttgaggacctcgcggcggagcatggcgatgaactcgtggggttttagggttttgccgaagtcgacggcattgttggaaggggagaagatatgcatgcgcgtcacgtggcggtcgatgatgtggtgagggatgtcgaactctttgagcatgcagagaggcatggcgccgccgcaccgcttcgcgacggacggcggttgcgttcgaagaggaaggtctcgagaccgctggacgctagggtctccaccaaggaggatccgacgaggacgccgccggtcactgccgcccggagctttcgctcgaagatggatttgaaggctgagacggtgaacgagtttaagtagggttttttgggttttgaggttgggatggagaatgtaggtaaacaaaaactagtttgaattttcgcagccatggagagtgagtttaaaattttaagttactatgtaatattgatcgggttttctggtgtaacaataattacacacaactttttatgtatttcccatttgatcatagaggatggcaaacaacttctttcataacctgttgtgttgttgtcattggactaattgtgtaacatttttttcccttttttcttttcgaaaaacctgtcacacgtactttccccgtttctcaacaaccttcataagcaaaatttatgttttcgtacttatttttcatttacggaagtaaaaacaaacaaaaaagaatcactcatagtactttaaaaaaatgaaaaataagaagaggcgttttgaactcctttgtaaagaagctgccagtaagatggtcaatatcccctcgtaaactgatcgtctttctaactgcacacagtcgagtttgtatttgatggctgcagatttatatatagtatttattaattttctttacacaacatcatctataatattttcaaaaactaataattcgactctaatctgacttagggtaataagctttaatgatttctcttattgataaacaccagcacttctttcatgaagagtgtgcataagcactctcaaaactagtgtgtaacctggtgacattttggtaaatatgatacgcctatcatatataaacactactctgtgcaaagcaaaaaactggagccaattgcttatttcgtccttcgatttctttcataaaatgattggtggtttgttacacatccacgagattaaaaacatgttatactattcacttgatatttatagtggtttctatattaaaggtccctcctgcagtttgtacaagaatcttgggtcatgaggctgttaggtgagtgagtgtatgcctttcactctttttattaaacttgcacttttaggggtaggtgctgcttggagaacagcaggtgtggagccagggtctacagtagccattttggggttgggaagtattggattagcagtaaggaatccacatagctttcttttgtgtgttttgtggtttattatactcaaacgctcatagcaagtgaatggtttcctaggctgccgagggagctagactttgtggagcaactaggattataggtatggatttcaacctagaaaaatatgaaactggtaacgcattatctgcttaatgataatgcttaaacaaattttgttttgtgtcattattgtgttcaaattatgtaattgattttgtgggtttgttcctctgatttactcagggaaaaagtttgggctcactgactttgtctatgctggagaaagtgaaaacaaatctgtgagccaggtctaccctcttctaggctccaatctttatttaatttagttgccttaagtcttgaaatttccttctcatatgtgcttgtttagcaggttatcatagagatgactggcgggggagctgattattgctttgaatgtgtgggaatggcatcattggtgcaagaagcatatgcttcttgtagaaaggtctctctcctctctctctctctctctctctctctctctctctctctctatccctctccctctatctatctatccatcaaagtgcccctaaaaatgccttgcactatggtttataggcagacatagtaatgtgattgaataaataactgcagaataattttggaagaaataaatatagaaacgtcacgtgatatccttccatattatacagtagattgtattagtttttttaaaaaaaaaaattgtcaaatcaatctcttaaaaaatttcttattcacttttctccaatgattttatgcctatattagttttaattaaatctgtaatcaaattaatttctgctacttttttgttattgctttgttcatttaccttgtcattttcctatttcaaatttaagtcttgatcgtcaaagacgtgtaaaaaaagtcctaaagaaatgacaagtattattatatttggcaactttttgagttttgcttttgagttaaagacgctagaaactccctataaataattataaatgataagtattatgcttgacaactttttagattgtcttctacacggtgagtaaaataatattcttaaaataaacaataattactatgggtagttattgtcgagtcttcccttcatcaagacgttaaaaaatttataagataaataacaaaatattccacaccttttcaaggataatgaatgagaactttgtgatcatgctaaatgcagttctatggtagttccttgatatcaaaattaggatgttagctgtaattaaggactttgcttctcaaattaattagtgtgagtttgaatctggatgtaataagtagtaactcatgtctctttaagtatttatataattctttttttccccttcaattttctttatattaactaaatccctattgttgaggttgattggatttttacatatcatgttaacctttaattagaatgattaataaaattttgtttggaatttgaagtatttccactcttttaaatgtttgaagacaaacattttctttaacttttggatatgaatttgccaatttaatctatttattttattgttatcattaattttgtgtagtcatgtatgatcctaaagaagaaaaaatggttgcaaaaaatatatacttgtattatatataaataaaaataataaatgttatcattattaataataactaatcaattttattaaataataaattaaagagataaataaattacgtgaatgaagacacgtcaattttattaaaatagtatgtcaaatttcaaaaattgattgagatgaacaaagattacaataatttttaaatatagtttataaaaaaaaaaaaatctttgttttatatagtttatgatttaaaatcaaaagttaaatcaaatcttaattataattaattagttttaaatatttgtatttaaaaggcataaaaatataaaaaaaactcttggaacgcgattgcgcggcatagtcgccggtgccgacagctttggccacgccgctattggagcggcgccgatcacaacgtcgacggatagggagtggcgcgaggagccgttggtggtgtagtggacggtgtagggccgtccggggctgcggggagatcgaggccggtgacgaggccggagacctcggtagcgacggcgacgtgcgcgcgggagcggaggaaggagttgaggacctcgcggcggagcatggcgatgaacttgtggggttttagggttttgccgaagtcgacggcgatgttggaaggggagaagatgtgcatgcgcgtcacgtggcagtcgatgatgtggtgagggatgtcgaactcttcgagcatgcagagagggatggcgtcgctgcaccgcttcgcgacggacagcggttgcgttcgaagaggaaggtctcgagatcgccggatgctagggtctccgtcgaggaggatccggcggggacgccgccgatcactgccgcccagagctttcggtcggagatggatttggaggctgagacggcgaacgagtttaagtagggttttttgggttttgaggttgggatggagaatgtaggtaaacaaaaactattttgaattttcgcagccatggagagtgagttaggattttggatcaatatctgtgatttagggtttgctactttgtttcctccatgtgttttaggtataacatcttacattttcttcagtaaagttgtacatttggtatctttttcaagttcttatttaatattgtaaatgcatagttttaatcgatttcagaggacaaaagcaaatgctgtcagcaccaaaagtccaaaacccattttgtgctgtgcgattttaatgaagaaatgattttcaaagcatacctagcagtgatacagtgcagtagcaccctatttctttacctctttctgtactgcatgggagggactgacatatggcttttcaattatttgcttaccccaaattgttctgaaacttttgtttatgaaacttgtatatttgagagttttgagtagagtaaatttgatatcatgaaggattgaaggtagccacaggaaatgctagacttccatgttaaccaactcatggatggtgataggacggcaaagatcaggtatcggttggccagaccaggctgcatcagctaggattttgttgactgcttgagtagggttgaacaaatcccaccaaacatgagttgaagcttgatcacaggccatgtacatggagacgcaccctatcatggcaccattcaaaccaagtctgcaacatgcactcttcatgtcttcaaaaccagtataaagaacacttgatatagttgtttcacatgagtgcttgtaaatttcttacaatataaaggaacagattggtgttgtagattctgccaggccaaagagatttcaaatgcttgacgacaatcaacattcagcataggtaaattttcaatttgaagttatcaagggaggaaaaacataccataaacccttggttcgttgataatcttcatcattccattgtaaatatcacagaacaccatctgagcatcagaaaattccgtattaagcttgcctatttgttcatccagcaatctattgtattcaaagaccaagtcattgacatgtttgacagatccacttgcattataatctccagctgatgtgtaactcccaggcccagtggcggagccaccttagaaccagcaaggaccttagcactacctaaaaaataaaatttgcagttatattgagggacaatttttttttaataattatatatacttatataattaattaagattaaaaataaaatttggcactacctaaaaaataaaatttggtattatttaaaatttgacactacctaaaattacaagctggctccgccacaggccatatgaggtgtgcatcccaaaaggcagaattcccaaacatatgatattccaggcatttgcattataaagatacctcgcagcatttgccatttggttgaccaaaatggtagcaaaatattgggaactgttctggaacattcgactcgaactggaagagtaatgaaggaatagctcaatgtaatcttctttgccgaaggagagaaaaaagatggaggattttgtaaattggagagcagtgtcctcattcagctgcagttgcaacagctgcatagtctcagaaacttggcgtagttggttgttaagagactagtggctgtagcttccctggttcatgattgtagcttgtgttgaaccaaagttgaggccaccaagaacctcctccagagatccattttgtccataaaatggccggattgatgtcaatccaatcttctcagctgcaacacaatgatcctactacatcaattagtgttaaatctgtgtgagcctgtgctaacattagttatgctcatcgtaagtcaatattgaaaagtttctgcagaaataacagataattttggtacccctctaatttaccagtgaagaacttacagaaagagatgatgcatgtgtgtgcctgatgtcacttaaacgacactatagatcatgattatggaataaattgctcaaataaatgggcagctatcgcaatacattaattcagatcacattatgcagaaaaaaatgaaaggaaatatgctttcattcaccatgataggacttataagaatcactgaaagaagatttattttatcctgacacgaatgcaatggttccaaattataacttcctgcatcctgcatgtgagatttcagtggttctgtccaatttgcttgaatcacgaatgcagagtccaaatgatgaagaaaaacataaagaaaagtaccaagtagttgaggaagaagggtggcatcggagccgttacatggatacaaagagagacgaccatgaagcagagggtagaacagagtgttgtctccacaatcaaccgaggaatcccctaacacagtcaatgctgatacatgtgagctatacgtcacattagcattggtaattggtgtgcctgtcgactgtccatgaactatgcagagaatgaccattagcagaactgcaggagcagaatgaacaaacaataaacctcctcatatagtttacctactttttccttttgttttgtccactcgaattgctttgaccgaactgatttgatgctataacgttggtgttacagctaaaccatttaagtagggataaggaacttgtttgatccaaagtggtaagaagccaaagatttgcatttgattatctcagtttaaaaatgtaagttactatgtaatattgatcggtgtttctggtgtaacaataattacacacaactttttatgtattccccatttgatcatagaggaaggaaaacaacttctttcataacctgttgtgttgtcattggactaattgtctaactttttttttccttttttcttttcgaaaaacctgtcacaccttccccgtttctcaacaaccttcataagcaaaatttatgttttcgtacttatttttcatttacggaggtaaaaacaaacaaaaaagaatcacccatagtactttaaaaaaatgaaaaataagaagaggcgttttgaactcctttgtaaagaagcctccagttacatggtcaatatcccctcgtaaactgttcgtctttctaactgcacacagtcgagtttgtatttgatggctgcagatttttatatagtatttattaattttctttacacaacatcatctataatattttcaaatactaataattcgaatctaatctgacttagggtaataagctttaatgatttctcttattgataaacaccagcacttctttcacgaagagtgcataagcactctcaaaactagtgtgtaacctggtgacattttggtatatacgcctatcatatataaacactactctgtgcaaaacaaaaaactgaagccaatttcttatttcgtccttcgatttctttcataaaatgattggtggtttgttacacatatccacgagattaaaaacatgttatactattcacttgatatttatagtggtttctctattaaaggtccctcttgcaatttgtacaagaatcttgggatgaggctgttgggtgagtgagtgtatgcctttcactctttttagttttataattttatttactggataatattattcaatcctaaggaaaaagaaatccactgtttattaataccctatttgtattgtatctttctgtatcaacataaacttttgcgctttactttttaggtaggtagagtaaacttttgtggtttaatatataaatgtttggtcaaactttatgtggttcttactccctagtccttacagatgtggtttctacatacatcagttgtattaagttagggggcttgtctttttgggctctattgctatatcttttattcatgtaatggcttggttttgaccagtttgtgctcaaacctttgttcttttattcaatacattactttttcctttcaaaataataataaaaaaaaaggtattctgtgttacacatgctaaaattgtttagaggcatctttgtggtctaactatcaggagtattctaaattaatcctagagaaaagattggatagttatgaggcaaattttaatgtttcaattttgatcaaggattaaataacaaagcaaagtgtgtctgcaaaccttcagatgatttaacaacagtactcgatacattgatttaagaacaaattctacgactaattatatttatctttgctacctatttttgtgttggttgccaacgatttgccaccttgagccccattatatcttctgcatattatattatagaagctgatgatgatgttctagctaattttgatatgatccagggttgtggaaagcgtaggagaggatgtaaccgaagtcacaaaaggatatgtggttgttccaattttcttacctgattgtggggattgtatagattgcaaatcaagcaagagcaacctttgttcaaagtttcctttcgaggtgtctccttggatgcctagacatgccacctctagattcacggatttaaaaggagatatcataccccatttcttgtttgcgtctagttttagtgagtataccgtggttgacattgctcatctaaccaagattgatccagcaataccacccaacagggcaggcctacttagttgtggtgtatcaacatgtaatttgcctaaaccatgcaaaattgtaaacattaaacaaaaagaatattgaagaactatatcagttgcataataaaaattatagtcagaatatcttatcataaataaacacatggttgtattcacattttaattcactactcaacaacgttcatctaattcagtattttgattaaacttgcacttttaggggtaggtgctgcttggagaacagcaggtgtggagccagggtctacagtagccatttttgggttgggaagtattggattagcagtaaggaatccacatagctttttttgtgtgtgttttgtggtttattatactcaaacgctcatagcaagtgactggtttcctaggttgccgagggagctagactttgtggagcaactaggattataggtgtggatttcaacccagaaaaatatgaaactggtaatgcattatctgcttaatgatagtgcttatacaaatttgttttgtgtcattattgtgctcaaattatataattgattttgcgggtttgttcttctgatttactcaggaaaaaagtttggactcactgactttgtccatgctggacaaagtaaaaacaaatctgtgagccaggtctaccctcttctaggctccaatctttatttaatttagttgccttaagtcttgaaatttcattctcatatgtgcttgtttagcaggttatcatagagatgactggcgggggagctgattattgctttgaatgtgttggaatggcatcattggtgcaagaagcatatgcttcttgcaaaaaggtctctctcctctctctctctctctctctatccctctccctctatctatctatttgtctatctatctatctatctctcaaagtgcccctaaacatgccttgcaagatggtttataggccgacagagtaatgtgattgaatgaataactgcagaataattttaaaggatcaacctagcactaaaagtagcactagtaataggttttcttttgtgctatctaatttgaaattcatggtacttgatgaaaatgaagtttcctgtcaaattgagacaggtttgattggaaattttaataataaactcttatcacatgcaaacttgttgaatgttgttaaaactgatgctttccctacagggttggggaaaaacaatagttttaggagtggacaagccaggatccacgttgagccttagttgtaatgaggtcttccatagtgggaagagcctcgtggggtgcttatttggaggactcaaacccaagtctgacgtacctattctccttaaacgctacctggacaaggtactttgtgcaatttcttttaatttttttcagtgtatgctcttgatcccttctattaacatagtgatgactaagtaaaataataatgccataaaacaaagttttcaggatgcatttgtttggtactaaatttcatctgcaattatcaacaggaactgaatttggatgggtttgtcacacacgaggtggagttcaaggatatcaacaaagcctttgatttatcggttgaaggacagtgtcttcgatgtgtgattagacggacagataagctcattattgtataagtttattgttgctttacttaagcccttgaattatgacatcaaaaatgaaattttgtatactgttcttttgtatttgaataaaacaattcttaaagaagtgttggtgaattggtgatcaatccaccatcccatcaaattcaaaagtgcctccgttagaaggttacataataatacagtacacagaaattacacaaacaaattatttagaacatgtttggaaacacgttttggatcaacgttcaagcagcaaaaccacgtaaaaatgacgcagaagctacatgcacttagtgggatttccgaagtcatagtatcaaactctccatgcttggtgtttccaacactttagatctcaccaagctcccaatggtattgacgaaaagcttagcatcatccaacactctcccacgtgccaacttcttatacaaatagttctcaaacatcatgcgttgaacatactcatcctcacacagttccaccagagccttcctggacacgttactacgtagaaaaccctctgcagcatgtgcgcgggagcggaggaaggagtcgatcgaggacctcgcagcagagcatggggatgaacttgtggggttttagggttttgcagaagtcgacgatgatgttggaaggggagaagatgcgcatgaacgtcacgtggcggtcgatgaggtggtgaggaatgtcaaactcttcgagcatgcagagagggatggcgcgccgcacggcttcacgacggacgctgggttgcgttcgaagaggaaggtctggatgccgtcggaggctagggcctctgctgcggaggatccagcgaggccaccatcaatcactgttgcccggagctttcggctagagatggatttggaggctgagatggtgaacgagtttaagcaggcttttgaggttggaatggagaatgtaggtaaacaaaaactagtttgaattttcgcagccatggagagagttaggattttggatcaatatctgtgatttagggttttctactttgttccttccatgtgttttagtaataatatattaataattacattttctttagtaaagttgtatatatattgggaatttttttttcaagttcttatttaatattgtaaatgcatagtttaatgttctaataaagaaatgatttccaaagcatacccaacagtgttgcagtgccgtagcaccctatttcttttataaaaaaattactgcataggcctagctagcatatggctttacaattatttgctacccctaaatgttctgaaacttttgtttatgaaacttgtatatttgagagttttaggtagtgtaaatttgacatcatgaaggttacgggtgtttatggattggattttaaaaaataatacattacagcccaagagcattccaaatagcaacccacaagagtatgaagcagaaaaataagatgcagccaaaagaaaaggaagactttggaatgatgctagctagaaagtaaccttaaggagctaagtaccttgtataaaaatttaattatttttattcttatgttactttcattttcaattttctttttctacttttctcagtagttttgatgcctgaacaacattcatcatgaactaattacatctgaaaatagaatgatacaattgtacatttaattgtgttagcctaaattcttccagcaaacagtacatatgttcctaatataatgccaactgtgtgccgattgaaggttcaatgtgcaaattttccttgatgcttatgcaggttaccctagataatttacggaaaattagttacctgaaattaaaacaaaagcattcatcacattttttttcttcttatttgcaaacaacttgaaatagatcacttaggtgagatttcttccacaaaagacaaaagttaaaattacagaaaacaagtcgcatcgcacacgaaagaatcatattaaatttatttttatatcattaaaatccatcataaataaataattttaaaattcagctaataaaaagtgtttcagcaattttttcatatataaattatattttaaatttataatgaataatttaaattatgatataatattatttttaaaaattgataatttatttttataagaactattgaaattcaattttaaaatagtgataaaatatagtagatgaaaagagacaaactattaagatgtttaaacataaaatacagataaagaaaaatgacagattgagatgttttaatttacagtaataatgtgtgaaattcacatccagaatctagatgatcagaatgtttaattaaagtggagagagtgtgactcacgtttcacgtgaaccattttttaaaggaaaaaattacgtttaacaaatggatttaagacgccaaaatggagtctgtaaaactttttggctgttgtgaaatgctagaaagtccttttgacaaatctttaatcattgagtgaattttacgtaaatcccatcactcaaattttgtaatagaattcacatcaaatttagccaataataaaaaaatgttaaacaagagtatattgttagtattactttttatttattttatcttttgatatgaatttttaataggtttccaatattttttttgaaatgcaaaactgaataatagaatctgaatatatatagtataagggtataaaattgttttcaatatttggacattgctagggtatataaatttcagaagtagaactatgtttttaatttcaagatcaatattcagtcgtttgctgtgtgcatattagtatatgatcaatattgtttctttttttggtccaaatatctatcaatatcgtttcaactttcaaatatgaaaagtggcagcctttagaacattaccaggccattgttatggtgactttgatgttatggtgacacattggcttgggcgcatctacgatcaccatgcagcaaaattaatcaataagcagcaaaattaatcaataattgatctgagtttgatagggatagttgtttggagaaagcatgtaatatggttaggagaaacctttcaaaatgtgagagatttctactttctactactactaatgttatatcttatttagttgggagagattatatcacaagggtataagtatgtttgtttaaattggggatgcaaactgtacaaggggagacatttggtgttgtgaggacagaaaaattagagaaatcttaaaaaaaataatgagatggttatttaaaaattttaattgagagaagaattgttgaagagcaatttaaatttcaaaataaatgtaggagaagattaaaggagattttttaagatatttactatattcaaatttttaggattttatctagatttaattattttattaatttttttttacttattttagagattttttttaaggttaggatggtgataatatttgaatattgtattgttatttaactctatatatggaaccaagaaagaaagaaaaaaatcctacaatgtatttcatctaagatcccttgggtgtgtgggtaattttgctgtgcgtggtggagtttttcctaacacattgttatggtgacgttggtttatttattttcgcttaaggaacctcccaaagggacacagtggcctgggcacatctacgatcatcattcagcaaaattaatcaataattagactgagttggttaggaattgttgtttggagaaagtatgtaataacaggggtaggtgaaaccaatttttaatttaaaagtccacttttagtcatagctcgtattatggcatttgtgacacggtatatgtctgtattcaagaggtggctaataagtttttatctttggagataggcatcaaagtctttgagccaataatatgggatgatcactcattttgatatcttctcgctaggaatgaaaagattatcgtctcccacgtgtgttattaggaacctagtaaaattcacttagagttagttaatcacttaacttattatggttaattacttgttagtcgcttaatagatagtataaataagagcaccatataccttctctgtattttaatcaatcaatgtgcgtgcaacctcttgagatttgttccattacttggcctatgcctgtgatatgtatccctctcatcctctgatcactaacatttgtctctgatattatgtttatttatttattttaattttaaaaaacaattgaggtacattatctgattctaatgttatctcaacccttaatttcaagaacatggttaccctctggtgcctttgtctagaaattttgtaatgcatatggatcagtctttccagaggctgtatcaggatcaattatcaacttcaatatctgtttgtagaacagagagttgaaagaaggttttaactcaagtcacttgtatgtaaattctccatcgtttactgttaaatactttgtttcaaggatagccttgtgtttttgcaaataagaaaatcctactctttctggttggagttttggcataaagtcctttcactaagcaaaaacataccgatcttaaactaatggaattttctgtagtgctgttagtaaagaaaaagacagaagacccacagaaccttcatccgcagtgaattctaaaactaccgaaaggttggttttctacttcttttcacagtagctttgatgctgaacagcattcatcatgaactaactatatctgaaaatacaatgatacaattgtacatttaattgggttaccagaattcttccagagaactgtatataaattcctaatataatgtcaatttacggaaaattaattgcttgaaattgaaaccaaagaactcatcacattttttttttcttatttggaaacaacttgaaatggatcactcaccagagaatatttcttccacagacagaagttaaaattacagaaaacatacagactcacaaaagaaccataataaactaagagtagactatttttttcccctatgatttgtccttttcactcttaattaattaagcacaccttcaacaagctcgctagccattgtggtttcccagtcattaaaacattatatcccaaaagcattccaaatagaaacccacatgcatatccaactgctacagctttccagccaaatcctgattcttcatggtgaaatgttgaatgtggtggcctttcttgatcctcattgcaggattttgacaaaggggatccacatagcattggatttccaacataggaatcattttcaaatgtgttaaattgtccacctttaggtatgattccctcaaggtggttttgtgagaggttcaacacagccagaaaattcaaattggtaaaagccacaggaatctctcctgttaactggttccatgaaaggtccaaccattccaaatttcttaaattaccaaaggatcgtggaatggtaccagtgattgcattgtgcgaaaggttaagccctatgagagaatgcaattctccaatgactttcggaagttctccttcaaatttattatttgataaatcaatggttgtgaaaatagttaatatcctcttgagctccacgaattgacctttcattacaaccactactgaatcattatagtaatcggcgttacccatatatgtcaaaccagtttggttgtcattcacactcaccattccttgaaagttcttgatgtatgatgctggcaagggcccactaaaattgttatttgagacatcaaaaattctcagcctgggaaatggatgcttggcaccgaaacaagtgatgacaccatgaaacttatttgatcgcaaactgagtacctgtaaccgctggaggctttctagccaatggggaaatgtatcctctatgttattgtctgccaggtccaaaacttccagccttgtgcagtgggccaaagaccgtggtaatggtccatccaattggttgccattcaactttatagtctccaattcatgtaagtaataagaaaagttcccaggtatgttgccgtaaaggttgttcttttgcaaatccaatgcccaaagaaaaggcaatgttcccaggcatggcggaatctggcctgtcaagttgttatgagccaagttgagtatatggaggccgcttgcattgcacattgctgaaggaatgttcccagtcagctcattatttgagactaaaaagttctgaatgccgggtggaattgggagatcgccttgcaacttgttgaaactgaggtcaatatatctcatgttatgaaaccacgggggaatgcttccacgaatgttgttatgagaaagatctagtgagatcagattttgaagtagtgctaagaatttagggaaagtattaatattacaggaagataaatataagattttaaggttgggtaagatgtagtcagcggtactatcgaagttaatagagagaaaattattgtgagaaagatcgaggcgctctagatttttgaacattgaaaattgatgaaagtccagatgaccactcaagtcaattgaccccgtgaggtagttgttgctaacatccaaccatagcaaggaaggcaaaaaataacaccaatatggaatggggccaactaattcattaaatgatagatctaaagtgtagagttgagttagattaaagacggatgagggaagcagtccatcaaaattgcaaccccccagatctagtgtgacaagagacttcaaatggccaatggaaccggggatgtttcccgagaaagcagtctcagagagatccaagtaaattagtggagtactccagtttgactttggaagttcacctctcagcttttcattttcatgcaaatctagtttttgaagattgggtaaagagaggatgtcactcgacagattcccttgcaatttggtgtctgcaagactaagggagaccaaagaggaagagagattggttagcaatgacaaagagctctctccgatacaagacatgtccacgccatctaaagtaagctctcttaaattagttgcgttttgaatgagcttcttccatgtgtatggatcaattctcattctcgggcggttgggatcatcatttatattgtagagatcaagtgacagtaatttggacaagtgagagattgtggagggaatgtcaccaaaaatataatcaaaggataggtcaagaccaatcacgtggcctgagatggtgtcgcacgtgaccccattccactcacaacaatctgttccgttgttccaagattttgttttggaaggaaaatcatttgaagtgttgagtgagtatttgagttgtagcaaggcagagctgtcatcatggttgcagaaagaggaagaagaagaaggaagaaaaagaagaagaagaagaaggaagagaaagtatgggagtagaacccaccaaacattcttattcatattcatcctttcaactcaacaacaaaactatacaggatttttggatgcaaccatttcaattcacgaacttctatttatagcctacgctgcttcaaagcctttcatttcgatttaactctttctttgctttttcttccttcgcctgtgatataataatatatttgtaaatcattatcaaattaattttatgttatttagatataataatatatttgtaaatcatttttgctttgaacattggatggacaacttcctcaatgcactcatcgtgaaggttgtttagcgagaatgaatcaatggaggctattggtgtgaaacagtcattatcgcggtattcgtattcatcatgttcctgtattgatgaaatcaaaccttttttctttaaaaatgtgataattttatttagtctttaagagaatatatgtttattatatagattcacaatttcataattttcttcataatcttgggatttgaatcatttattcaaaaataaccatgcctaaaaacactattatttaatagaagaattcgaattataataaaaaacatattaattacaccaagagttgtaaattgattattaaacataactatatcaaataattaaaaggttactaaaattgtctttttcttttttttacttttacaaagagaaatatttaaatttattgctttaaaattttatttgatatcacactagttttctttttcaaaaaatctgttaaaaatgatttcttaagatttcttcgtcatcatcttagttctccaattattttatgaccttaaaagtttagtctatcgtccgtaaaaaacaaaaaaagtttagtctagtatcaagttaattcctcaattttttatgtaactactcttttcatttattttgttatttctctagttcgtattttttaatgacaagtaacatgtttgataattctttaatagaaacttgtaaaatgattatattttatttttgtactttgggtcacaattatattgaacggggcacaaaaaaaaaagagtaaccatttttgaatattttatttttgtaaacacaaaattaacactcattatttttgtctctattttttttttattacattatgtcacttatagtgctgtcatttgaaacggacctaataaagaagaaagttaaaaagcaatgagcactcaatatcatatcaaagacgaagacgcaatagtgataaagtaaacagcgtgtcaatgcattattagttacttttaatttttgtttcagatatacaagtgcttcatacaactttaattctaaagttgcaagaacgttaaatcatgaataatgataacaatcgacagtctaaaccgcgtaaattgtggttcgtgtatattttaagaaatatttaaatatatttttacataaatatatgtttccaaaaatattattatctggagcattattttatataatatttttatttactacgatgatgtcttacatatttttcttttgatcgttttttttttaaaaacaaattgacttaattatttttatgatttgcactcttgattttggataacaaaaaattgagtgaaaatttttaattacaatagaattcttttgtatttaatttatctttttaagtttcaaacatcatctaaaaatgttttaacagtaaaaaatgttattaaaaaatgtcatttaattttgattgtgattggaatggaaggaaaaaatatattatattaatgttaattatttgaattgatacttcacaatttgattaattttaaattaaattattttaaaatttaatttcatatatatttgcattatgatatttttcctttgaaattgaattatttccaaaaatatattaaatcattttccacataaattttgtttttagttttattatggttaattctattttaaattaaattagtttaaaaataatttgttcattaaatattttcatgaataactattataagaaatgaaactttattaaaataaataaatatttttgtcattaaaattcaatcaaatattcacggagaaatattttttcatcaatcatacaatcttgtataattttcatttgcaaagtctaaattttagtatgataaaaaatattattaaataattttatataattatttaagaacaattcttaaatattttcgtgaataaatttcataagaaatgaaactttattaaaataaataatttttttcatgattaaatttcaaccaaatattcatggatcggagggatatattttcatcaataataaattcctgattaaatttcttttgcaaggtctaaattttagtatagtaaaaaatgttattaaataattttgaataattattttataacaatcgttaccacggataccataatttgacgtattattatggaactaaaatatacataaaattaaaattatatttataacagcctctctctctctttcctttagccttctctctctttcctttcttccttttctctgcttctgacattgatgaattagagaagcttcttaaacactcaaccgttgaccaaaacctttcacacccaacatgaaagttgaaaggaactactcaatgagttagatttcatcatcacttttctctgaaaatcatcaaacaaagagatcaagttctctagggaactttaagaaaactgagtttagaagggaaagaaggtgattcaaggacgccaaagcttggagaagagatccttcacccttcctcgactgtttagaggtaagaaactcaagttttgccgattgatttgagaatttgttcttggggtgaataatgaccattttgtgatagggctgagattagacttgggttctttagaaaagtatgctcaggaggctgttctgatgaattttaaactttgaaacatgttttttgattaagtttgattttgactatgagtttggtatgggtaggaaaaatgttgagtaaatggaagatattatgatagttatgagcctaagtgcctttacaaaagttgttcagaaggccaaataaacggtgaaaatgtgttgatatatctgttttagtcatgttggaaaattgttgaaatatggtctggttaggtcatgaaattggtttatgcagagttttagagtgactataatgcttggttaggctggaacagatcttgctgagggtctgtgagtcgcctataaggtggatagttcaggtaaccttaagttagagaacaaaaaggtgtaatggaaaggaatgacgtttcttttcattctaaacggttgagaaccgttattgattggttgtttgtatgtcttgtgtagggcatgatacagacattactggtggttgtgaccacgaagccgggagagccggtaagctctttgtttttgggagtgtttcccactgtttgtgttccaccatactctgagagagtgatggttattgtatatcatgatgcatgtatattgaaattgtgtattactattttatgataatatgtatatgatgagctgaacactgtgatagtattgtatatgtgattgatgagattctctggccagtagaattatgtttaatagactgtatatatatataagtcttgatgtgagatgtgtctacatagttggatgaagcctcctcaggcaagaatgaaagtcctgctgtgagatgtgcccacatagtggatgaagcctcctcaggaattgatatatatatagatatatatatatatatatatatttgtatatgtgctatgtacatgtggtaatatggcttgatagctgtgattactagtttgtaatgccaattttgatattatatgctatggaagtgaaccaggggggagaaaagacctccaaggaccctgagtctactgagattgttatctcacccctgttgggggttatgttttgcaggtgatactcagggagccgctgaaagatcccagggcaagaggcccgagcagggataggttctgtgagaaccttaggcatagtgtttaagagcatgttggctctatcttttgattcatgcctgttattttgtatcttgatagagattttgtatagtttttgaaatatacattgtatattataggaattcactatatataatgtacaattgttgttaatgatgcttgatgacgtcatgttgcttattgcttccgaattaattatttgtgataatcgctgcgcttaataaccataaatcaatgttaatgcacaggatgcatacagggtgttacaatattaaaaaattaaaattaaattcatataatagttaatgtaaaaaattaattgcaaaatatttttttattaattctcctgaaagaaatatattataattaaggtgactatttaaaagataactattattaatgaataaataaaaaatgatattgattacatttatcattaaatttattattttgggagaaataaatatagaaacgtcacgtgatatcctttcatgttatacagtagattgtattagttttttttttttaaaaatagttgtcaaatcaatctcttaaaaaaatttcttattcacttttctccaatgattttatgcctaaattagttttaattaaatctaccatcaaattaatttctgctacttttttgttattgctttgttcatttaccttgtcattttcctatttcaaatttaagtcttgacctcgtcaaagacgtgtaaaaatggtcctaaagaaatgacaagtattattatatttggcaactttttgagttttgcttttgagttaaagacactagctagaaactccctataaagaattagaaatgataagcattatgcttgacaactttttagattgtcttctacacggtgagtaaaataatattcttaaaataaacaataattactatgggtagttattgtcgagtcttcccttcatcaagacgtcaaaaaatttataagataaataacaaaatattccacaccttttcaaggataatgaatgagaactttgtgatcatgctaaatgcagttctatggtggttccttgatatcaaaattaggatgttagctgtaattaaggactttgcttctcaaattaattagtgtgagtttgaatctggatgtaataagtagtaactcatgtctctttaagtatttatataattctttttttcccctgcaattttctttatattaactaaataccttttgttgaggttgattagatttttacatatcaagttaacctttaattagaatgattaataaaattttgtttggaatttgaagtatttccactcttttaaatgtttgaagacaaacattttctttaacttttggatatgaatttgccaatttaatctatttattttattgttatctttaattttgtgtagtcatgtatgatcctaaagaagaaaaaatggttgcaaaaaatatatacttgtattatatataaataaaaataataaatgttatcattattaataataactaatcaattttattaaataataaattaaacagataaataaattacttgaatgaagacacgtcaattttattaaaatagtatgtcaaatttcaaaaattgattgagatgaacaaagattacaataatttttaaatatagtttataaaaaaaaaacatatttgttttatatagtttatgatttaaaatcaaaagttaaatcaaatcttaattagaattaattagttttaaatattagtatttaaaaggtataaaaatatacaaaggctcttggaacgcgattgcgcggcatagtcgccggtgccaacggctttggccacgccgctattggagcggcgccaatcacgacgtcgacggatagggagtggcgcgaggagccgttggtggtgtagtggacggtgtagggccgtccggggctgcggggagatcgaggccggtgacgaggccggagacctcggtagcgacggcgacgtgcgcgcgggagcggaggaaggagttgaggacctcgtggcggagcatggcgatgaactcgtggggttttagggttttgccgaagtcgacggcgatgttggaagggaagaagatgtgcatgcgcgtcacgtggcggtcgatgatgtggtgagggatgtcgaactcttcgagcatgcagagagggatggcgccgccgcaccgcttcgcgacggacggcggttgcgttcgaagaggaaggtctcgagatcgccggatgctagggtctccgccgaggaggatccggcggggatgccgccgatcactgccgcccggagctttcggtcggagatggatttggaggctgagatggtgaacgagtttaagtagggttttttgggttttgaggttgggatggagaatgtaggtaaacaaaaactattttgaattttcgcagccatggagagtgagttaggattttggatcaatatctgtgatttagagtttgctactttgttccctccatgtgttttagtaataacatcttacattttcttcagtaaagttgtacatttggtatctttttcaagttcttatttaatattgtaaatgcatagttttaatcgatttcagaggacaaaagcaaatgctgtcagcaccaaaagtccaaaacccattttgtgctgtgcgattttaatgaagaaatgattttcaaagcatacctagcagtgatacagtgcagtagcaccctatttctttacctctttctgtactgcatgggactgacatatggcttttcaattatttgcttaccccaaattgttctgaaacttttgtttatgaaacttgtatatttgagagttttgagtagagtaaatttgatatcatgaaggattgaaggtagccacaggaaatgcttgacttccatgttaaccaactcatggatggtgataggacggcaaagatcaggtatcggttggccagaccaggctgcatcagctaggattttgttgactgcttgagtagggttgaacaaatcccaccaaacatgagttgaagcttgatcacaggccatgtacatggagacacaccctatcatggcaccattcaaaccaagtctgcaacatgcactcttcatgtcttcaaaaccagtataaagaacacttgatatagttgtttcacatgagtgcttgtaaatttcttacaatataaaggaacagattggtgttgtagattctgccaggccaaagagatttcaaatgcttgacgacaatcaacattcagcataggtaaattttcaatttgaagttatcaagggaggaaaaacataccataaacccttggttcgttgataatcttcatcattccattgtaaacatcacagaacaccatctgagcatcagaaaattccgtattaagcttgcctatttgttcatccagcaatctattgtattcaaagaccaagtcattgacatgttcgacagatccacttgcattataatctccagctgatgtgtaactcccaggcccagtggcggagccaccttagaaccagtaaggaccttagcactacctaaaaaataaaatttgcagttgttttgagggacaaatttttttaataattatatatacttatataattaattaagattaaaaataaaatttggcactacctaaaaaataaaatttggtactacttaaaatttgacactacctaaaattacaagctggctccgccacaggccagaccaggtgtgcatcccaaaaggcagaattcccaaacatatgatattcctggcatttgcattataaagatacctcgcagcatttgccatttggttgacaaaaatgatagcaaaatattgggaactgttctggaacattcgactcgaactggaagagttatgaaggaatagctcaatgtaatcttctttgccgaaggagagaaaaaagatggaggattttgtaaattggagagcagtgtcctcattcagctgcaattgcaacagctgcatagtctcagaaacttggaacagtggccaaaatgccacttttggcaaaaaaatttgccagaatgccacgaatccgaaattaaatgccaaaatgccacacagagtagttcgctggccagaaaagcgaaatccatgtgccacgtggcgttccgccatttgaagaccaaattcgctggaggggcatgcgaaatatgacctgtcagcgccttcaatgccacgtgtcacgacctgatagttcgctgacacacccagcgaattacgttgcatgtgccacatgtcagctttccattggttgtaagcaatatatttaaaatttaaaaaatgcgtataaactttggaaggccataacttttgactgggatgtccgattgaggcgaaatcggtggtcacgcgatcgtaattgagaggcgatgccgttggcaagtgcccaaagaggacttgcccaaattttttttccaaaaggggtctctaagtgcctcaaaattacgatttaagattcaaacatccaaaaatttctttttttctaattttttattttttcaattagtgaattgcatgctattttttatttttttagttacttctcttactttcgagcgttttgacatatcgtacgcttccatcagacattcctaacaaaaaatatcgttgcccaaagtttatacgcattttttaaattttaaatatattgcttacaaccaatggagagctgacacgtggcacatgccatgtaattcgctgggtgtgtcagcgaactatcagggcgtgacacgtggcattgaaggcgctgacaggtcatatttcgcaggccccctagcgaatttggtcttcaaatggcggaacgccaagtggcccatggatttctcttttctagccagcgaactactccgtgtggcattttggcatttaatttcggatccgtggcattctggcaaatttttttgccaaaagtggcattttggccactgttcccagaaacttggcgtaattgttggttaagagactggtggctgtagcttccctggttcatgattgagcttgtgttgaaccaaagttgaggccaccaagaacctcctccagagatccattttgtccataaaatggccggattgatgtcaatccaatcttctcagctgcaacacaatgatcccgctgcatcaattagtgttaaatctgtgtgagcctgtgctaacattagttatgctcatcgtaagtcaatattgaaaagtttctgcagaaataacagataattttggtacccctctaatttaccagtgaagaacttacagaaagagatgatgcatgtgtgtgcctgatgtcacttaaacgacactatagatcatgattatggaataaattgctcaaataaatgggcagctatcgcaatacattaattcagatcacattatgcagaaaaaaatgaaaggaaatatgctttcattcaccatgataggacttataagaatcactgaaagcagatttattttatcctgacacgaatgcaatggttccaaattataacttcctgcatcctgcatgtgagatttcagtggttctgtccaatttgcttgaatcacgaatgcagagtccaaatgatgaagaaaaagataaagaaaagtaccaagtagttgaggaagaagggtggcatcggagcctttacatggatacaaagagagacgaccatgaagcagagggtagaacagagtgttgtctccacaatcaaccgaggcttcccctaacacatacaaagctgatacatgtgagctattcgtcacattagcattggtaattggtgtgtctgtcgactgtccatgaactatgcagagaatgacctttagcagaactgcaggagcagaatgaacaaataataaacctcctcatatagtttgcctactttttccttttgttttgtccactcgaattgctttgaccgaactgatttgatgctataacgttggtgttacagctaaaccatttaagtagggataaggaacttgtttgatccaaagtggtaagaagccaaagatttgcacgattatctcagtttaaaaatgtaagttactatgtaatattgatcggtttttctggtgtaacaataagtacacacaactttttatgtatttcccatttgatcatagaggaaggaaaacaacttctttcataacctgttgtgttgtcattggactaattgtctaactttttttttccttttttcttttcgaaaaacctgtcacaccttccccgtttctcaacaaccttcataagcaaaatttatgttttcgtacttatttttcatttacggaggtaaaaacaaacaaaaaagaatcacccatagtactttaaaaaaatgaaaaataagaagaggcgttttgaactcctttgtaaagaagcctccagttacatggtcaataccccctcgtaaactgttcgtctttctaactgcacacagtcgagtttgtatttgatggctgcagatttttatatagtatttattaattttctttacacaacatcatctataatattttcaaatactaataattcgaatctaatctgacttagggtaataagctttaatgatatctcttattgataaacaccagcacttctttcatgaagagtgcataagcactctcaaaactagtgtgtaacctggtgacattttggtaaatatgatacgcctatcatatataaacactactctgtgcaaaacaaaaaactgaagccaatttcttatttcttccttcgatttctttcataaaatgattggtggtttgttacacacatccacgagattaaaaacatgttatactattcacttgatatttatagtggtttctatattaaaggtccctcctgcaatttgtacaagaatcttgggatgaggctgttgggtgagtgagtgtatgcctttcactctttttagttttataattttatttactggataatattattcaatcctaaggaaaaagaaatccactgtttattaataccctatttgtattgtatctttctgtatcaacataaactattgcgctttactttttaggtaggtagagtaaacttttgtggtttaatatataaatgtttggtcaaactttatgtggttctcactccctagtccttacagatgtggtttctacatacatcagttgtattaagttagggggcttgtctttttgggctctattgctatatcttttattcatgtaatggcttggttttgaccagtttgtgctcaaacctttgttcttttattcaatacattactttttcctttcaaaataataaaaaaaaaggtattctgtgttacacatgctaaaattgtttagaggcatctttgtggtctaactatcaggagtagttaattttctaaattcaatcctagagaaaagattggatagttatgaggcaaattttaatgtttcaattttgatcaaggattaaataacaaagcaaagtgtgtctgcaaaccttcagatgatttaacaacagtaatcgatacattgatttaagaacaaattctacgactaattatatttatctttgctacctatttttgtgttggttgccaacgatttgccaccttgagccccattatatcttctgcatattatattatagaagctgatgatgatgttctagctaattttgatatgatccagggttgtggaaagcgtaggagaggatgtaaccgaagtcacaaaaggatatgtggttgttccaattttcttacctgattgtggggattgtatagattgcaaatcaagcaagagcaacctttgttcaaagtttcctttcgaggtgtctccttggatgcctagacatgccacctctagattcacggatttaaaaggagatatcataccccatttcttgtttgcgtctagttttagtgagtataccgtggttgacattgctcatctaaccaagattgatccagcaataccacccaacagggcaggcctacttagttgtggtgtatcaacatgtaatttgcctaaaccatgcaaaattgtaaacattaaacaaaaagaatattgaagaactatatcagttgcataataaaaattatagtcagaatatcttatcataaataaacaaatggttgtattcacattttaattcactactcaacaacgttcatctaattcagtattttgattaaacttgcacttttaggggtaggtgctgcttggagaacagcaggtgtggagccagggtctacagtagccatttttgggttgggaagtattggattagcagtaaggaatccacatggctttttttgtgtgtgttttgtggtttattatactcaaacgctcatagcaagtgactggtttcctaggttgccgagggagctagactttgtggagcaactaggattataggtgtggatttcaacccagcaaaatatgaaactggtaatgcattatctgcttaatgataatgcttatacaaatttgttttgtgtcattattgtgctcaaattatataattgattttgtgggtttgttcttctgatttactcaggaaaaaagtttggactcactgactttgtccatgctggacaaagtaaaaacaaatctgtgagccaggtctaccctcttctaggctccaatctttatttaatttagttgccttaagtcttgaaatttcattctcatatgtgcttgtttagcaggttatcatagagatgactggcgggggagctgattattgctttgaatgtgttggaatggcatcattggtgcaagaagcatatgcttcttgcaaaaaggtctctctcctctctctctctatccctctccctctatctatctatttgtctatctatctatctatctctcaaagtgcccctaaacatgccttgcaagatggtttataggctgacagagtaatgtgattgaatgaataactgcagaataattttaaaggatcaacctagcgctaaaagtagcactagtaataggttttcttttgtgctatctattttgaaattcatggtacttgataaaaatgaagtttcctgtcaaattgagacaggtttgattggaaattttaataataaactcttatcagatgcaaacttgttgaaagttgttaaaactgatgctttccctacagggttggggaaaaacaatagttttaggagtggacaagccaggatccacgttgagccttagttgtaatgaggtcctccatagtgggaagagccttgtggggtgcttatttggaggactcaaacccaagtctgacgtacctatgctccttaaacgctacctggacaaggtactttgtgcaatttcttttaattgttttcagtctatgctcttgatcccttctattaagatagtgatgactatgtaaaataataatgccatgaaacaaagttttcaggatgcatttgtttggtactaaatttcatctgcaattatcaactggaactgaatttggatgggtttgtcacacacgaggtggagttcaaggatatcaacaaagcctttgatttattgattgaaggacagtgtcttcgatgtgtgattggacggacagatgagctcattcttgtataagtttattgttgctttatttaagccctttgaattatgacattaacaaatgaaattttatatactgctcttttgtatttgaataaaacaattcttaaagaagtgttggtgaattggtgatcaattcatcattgcttcaaattcaaaagtgcctccgttagaaggttacataataatacagtacacagaaattatttagaacatgtttggaaacacgtttggatcaacgttcaagcagcaaaaccacgtaaaaatgacgcagaagctacatgcacttagtgggatttccgaagtcatagtatcaaactctacatgcgtggtgtttccaacactttagacctcaccaagctcccaacggtattgacgaaaagcttaattagcatcatccaacactctcccacgtgccaacttcttatacaaatagctctcaaacgtcatgcgttgaacatactcatccccacatagttccactagagccttcctggacgcgttactatgtagaaaaccctcagccccatgtgcgcgggagcggaggaaggagtcgaggaccacgcagcggagcatggtgatgaacttgtggggttttagggttataccgaagacgacgatgatgttggaaggggagaagatgcgcatgaacgccacgtggcggtcgatgatgtggtgaggaatgtcaaactcttcgagcatgcagagagggatggcgccgccgcacggcttcacgacggatccagcgaggtcaccatcaatcagtgtcacccggagctttcggccagagatggatttggaggctgagacggtgaacgagtttaagtagggttttgacttttgaggttggaatggagaatgtaggtaaacaaaaactagtttgaattttcgcagccatggagagagttaggattttggatcaatatctgtgatttatgggttttcttctttgttccttccatgtgttttagtaataatatatatattacattttctttattaaagttgtatattgggtaattttttttgtcgagatcagataggattattttttgttgacataagttaggattttttcggtcaacattggttttgactatttttttgttgacgttagttagatttttcagtccacattagtcaattatgtttttttgaccgacattgacgaatcatggtatttgttgatattggtcgaagctactcagctaggatatttttcgattaatgttagtcgatattatttttttggtcacatcaactaaagctattttggagggatgtcgatcaaggctatcttttcgccaattccggcttgggccatggatgccagcaaaaatggtctagattaaagttggtcaaaaatcttaatcatttcaatagaaaaaaaatcctgttaatagtctcagttgaaagtgtagcatgttgaattcctgcttcattttatatccactgcggtaattagtatggcttctagtaaacaataaaacacaaatctaatagcttgtttggaaaatctaatatacattgattctcttgtatataatatgaaataatacataattttattaactgagtaagacaattttatatttaaaggtcaaggaaaattttttagagtaaagttgagtggaacatttgtacatgaaatttggaatatgaatttcagaacatgaagagatcagattattgaacccacacaccgattcaacgcttgatgaaaggtgaaagcaaattcttcaatgaaaacccaacacttgatgtaatttaaaaaatattgtttttccaataatttacgctcttttgtgatataaattataggtcttgaacttgaactaggtattgataaggagataaataagatatgtaatgtcatttttaatggtaagatcattaatttgtggaagaataaacaagtaatatattacaagtaatatccttcctttttttttctttctattcttacactaaatttttaaattgtttaaaaaatattaaactaacacctctttttttaacacatgcacaccgttaatatattacatcaacctactttatttgttttaaaattatattgtgtctccctaaaaaagaaattgttggaaacgttaaaaaagcacgagatatttgcacaatcccatgaaatcgcataaagtatccgtgtaatttactttaatatttaccatatcaaatgtcatatcccgctagtcttgagcaggataattatatttaatgtatgtagcagcaattaatgtttttaatatgaaacataatcactatttttatagctccccattgggtgtgtaatgtaaaagtagtaaaaattgttgttggtgggaattgaaccttggacctattggttattaaaaataggcattatcatctcctttaattttcagtattgaacatatgttatagtaattaatatttgaggtccttatttttggggccctatgcggttgggcaccttaaatgggcccaaaaccgctcctggggccattgatgccagcaaaaatggtctcgattaaagttggtcaaaaatcttaatcgatttcaatagaaaaaaaaaatcatgttaatagtcttagttgaaagtgtagcatgttgaattcctgcttcattttatatccactgcggtaattagtatggcttctagtaaacaataaaacacaaatctagcttgtttggaaaatctaatgtacactgattctcttgtatgttcaattgggaaaatccaagttcttcaagaaaactgtccaacatttttcctaataaaatgctgatttttgtgatgatttaaggttggacgcgtgaattttcctcaatgcctttgcaggatacgactaattacacaatttatagcaaataaattgaacttaagacaaaattgattgatctctaaatttacttgtttgcacaaaaacttgaaatagatcacttgataatattgagagacgaaatttcattacacaaacaaagaagataaaattataaaaaaaataaaaaaaatacatacatacatactgataaacacatataatacagaaccatattaaactaatgcattccttgtcaatttgcatggattctgttattaatttgttcttttcactcctcaaataagcacaccttcaacaagtctcgctagccattgtggtttcccagtcattaaaacattatatcccaaaagcattccaaatagcaacccacatgcatatcccactgctacagctttccagccaaatcctgattcttcatggtgaaatgttgaatgtggtggccaatcttcatccttattgcaggattttgacaaagggaatccacatagcattagatttccagcatatgaatcatttccaaatgtgttaaattgtccacctgtaggtatgattccctcaaagtggttttgtgaaaggttcaacacagccagaaaattcaaattgatcaaagccacaggaatctctcctttcaactgattccacgagaggtccaaccattccaaatttcttaaataacaaaaggatcgtggaatggtaccagtgattgcattgtgcgaaaggttaagccctttgagagaatgcaattctccaatgactttcggaagttctccttcaaacatattatttgacaaatcaatggttgtgaaaatagttaatatcctctcgagctctaggtattgacctttcattacaaccactactgaatcattatagaaaccgccgttactcatatatttcaaaccagtttgggtgtcattcacactcaccattccttgaaagttcttgatgtatgatgctggcaagggcccactaaaattgttatttgagacatcaaaaattctcagcctgggaaatggatgcttggcaccgaaacaagtgatgacaccatgaaacttatttgatcgcaaactgagtacctgtaactgctggaggctttctagccaatggggaaatgtatcctctatgttattgtttgccaggtccaaaacttccagatttgtgcagtgggccaaagaccgtggtaatggtccatccaattggttgccattcaactttatagtcttcaatgcatttcccttagaaaagtttccaggaatgctgccgtaaaggttgttcttttgcaaatccaatgcccaaagagaaggaaatgttcccagacattgcggaatctggcctgtcaagttgttatgagccaagttgagtatatagagggagcttgcattgcacattgctgaaggaatattcccggtcagctcattatttgagactaaaaagtagtcaatgccattgggtggaattggaagatctccttgcaacttgttgaaactgaggtcaatatgaccaatggacttccaggagtgcaagagcttctcttgaaaccacgggggaatgcgtccacgaatgctgttatgagaaagatctagtgttgtcagatatttaagtggtgcaaagaatttagggaaagtattaatattacaggaagttaaatataagaattcaaggttgggtaagatgtagtcagcggtactatcaaagttaatagagagaaaactattgtgagaaagatccaggtaatttagatttttgaactttgaaaattgatgaaagttcagatgaccactcaagtcaattgaccccgtgaggcggttgtttctaagatccaatattaacaaggaagacaaagaataacaccaaggtggaattggtccctctaatttattgtcgtttaaatataaatgggagagttgagttagattaaacagtgatgagggaagcagtccatcaaaattgcaaccccacagacatactatgttaagagatttcaaatggccaatggaatcgggaatgcttcccgagaaagcagtatcagagagatacaagtaccttagtggagtactccagttagactttggaagttcacctccgaggtctttattatgatccaaatatagtttttgaagcttgggtaaagagaggatgtcactggatagattcccttgcaatttggtgtcagagagactaagggagatcaaagaggaagagagattggttagcaatgacaaagagctctctccgatacaagacatgtccacgccatctaaattaagctctcttaaattggttgcgttttgaatgagtttcttccaagtgtatggatcaagtctcattctcgggtagttgggatcataatttatcaaggagaagctaccgagatcaagtgacagtaatttggacaagtgagagattgtggagggaatgtgaccagtgaatccagagtatgacaaatttagatgcatgagattcacgagatcaccaattgcagaatatattgaagagccagaaaaattattataggctaggttgagtcgttgaaggtgtcttaggctgaagatggtgctgttgggatggagttgaccttgaatattactacagttaaggtcaagaccaatcacgtggcctgagatgatgtcgcaagtgaccccatcccactcacaacaatctgttccgtttttccaagattctgtctttgaagaaaaagaggaacaataataatgatatgtagtattgagagcatatgagtttttgaaaagtagcaaggcagaggtgtcaaggtggttgcagaaagaggaagaagaaggaagaaaaagaagaagaaggaagataaagtatgggagtagacgccaccaaacattgttagtcatattcatcctttcaactcaataacataactatagaggatttttggatacaaccatttcaattcacaaacttctatttatagcctacgctgcttcaaagcctttcatttcgattcaactctttctttgctttttcttccttagcctgtgtttcatatcatatcatgtctacctttataaaggcgcacataatttttcctttatctcattatttttacctttatttattttttctctttttatcaaatcatttattatatctattattttatttttattcaattaagaaatattttcactttttttaatatttaatgaatgtttaattttactcaattgctattaatataataatatatttctaaatcattatcaaaataattttctgttatttagataatttttttatattgccaaccattaaaaagtttaaatatttataattttgctactaattgattattgtaacaatgttaaaattaattatagtttatattttttacttcatttatagtgtttttggttaagtaaaatgttaagcaaatcactctccagtgggtgatccccatcaaacacccatgacatggattaaaaaaatattattttattattaaacaattttaacaaaataaaaaataaaaacaaaaagaaatttgttaaatcaaataaaaaagaatgaaattagggaaaaggaaaaaagaagacccaattattgtggctcatgcacaaaatcaccgcatctccttcacacctttgtgaaggtgaatttttctactttgaatattggagggacaacttcctcaacacattcctcgttaaagttgtttaatgagagtgagttggttgagattgttggtgtgaagctgttgtttaatgagaatatgtttattccatgattcacaatttcatagttttcttcataattttgggatttgaagtatttactcaaaaattatcatgcctaaaaacactctcatttaatagaagaattcgaattataatacaaaaatagattaattatagagttgtaaattgattattaaacataactataacaaataattaaaaggttactaaaactttcttctattttttttttttacttttgcaaagagaaatatttaaatttatttcttcaaaattttatttgttataacactagttttttttctttcaaaaaatcagttaaaaattctctcttaagatttcttagtcaccatcttagttctccaattattttatgactatattaatattataaaagtatagtctatcatccggaagaaaaaaaatgtctagtatcaagttaattaattcctcaattttttcttttattattattattattatagaatttctatggtacctctataaagttaaggaattttggtagtaaaacaagatattaagttagacttttaattatttatttgtttgtttattatatctctatatagtcctgtcattgtaggctcaactttgaaacggaactagctaaaaagaaagttaaaaagaaatgagcactcaatatcacatccaagacgaagaggctatagtgataaagtaaacagcgttttatgtagtaggagacgtgagaatgcattattagttacttttaatttttgtttcagatatacaagatgcttcatacaactttaattctaaagttagaagaacattaaatcatgaataatgataacaattgaaagtctaaccgcgtaaattgtcgttcgtggatgttgtgtccggcgttttttctttaagcgtttgttccttcgtgtgtgttggggagtagaaacttaacctgttctttcaccacaacacaccaagatttaatatattattaatttttttagtttaaattttaataaatatatatatgttagtaaaaattttaagaaatatttaaatatatttttatatacatacatgtttcaaaaaatgttattatttggagcattattttagattaaatctttggttactataatgatatcttacatgtcttctttttatctttttttttaaatgatttaatttttttaatgatttacatgcttgatttcggataataaaaattgagtgaaattttttaattacaatataattcttttatatttaatttatctttttaagtttcaaacatcatcaaaaaaatgattttacagtaaaaaaatgttattaaaaaatgccatttgattttgattggaagggaaggaaaaaataaaatatattaatgttaattatttgaattgatacttcataatttgattgattttaaattaaattattttaaaatttaatttcatatatatttgcattatgatatctttcctttgaaattgaattatttccaaaaatatattaagtcattttccacataaattttgtttttagttttattatgattaattctattttaaattaaattagtttcaaaaataatttgtttattaaatattttcatgaataaatgttataagaaatgaaactttattaaaataaataaatatttttgtgattaaaattcaatcaaatattcacataggaatatttttcatcaatcatacaatcttgtataatttttatttgcaaggtttacattttagtatagtaaaaaatgttattaaataattttgtataattattttataacaatcgttatcatggataccataatttgtcatgctattgtcgaactaaaatatatataaaataaaaattatataaaaaaattaaaattaaatagtaagtgcaaatatttaatcgcaaaatatttttttaatttgccttgaaagaaatatattataattaaggtaactatttaaaagataactactattaatgaataaataataaaaatgatatcaattgtatttattattaaatttattattttggaggaaatgaatatggaactgtcatgtgacattctctcatattatatagtagattgtattagttttttaaaaaaacataagttatcaaatcattctcttaaaaaaaattagtcactatttcagttctagaatgattttattactaaattagttctaattaaatctattatcaaattaatttctactacttttttgtaattacttttctgatttatcttatcattttcctatttcaaatttaagtcttgacctcgtcaaagacttgtaaaaatttcctaaaagaaatcctcgtaaactgatcgtctttctaactgcacacagtcgagtttgtatttgatggctgcagatttaaatatagtatttattaattttctttacaaaacatcatctataatattttcaaatacaaataattcgaatctaatctgacttagggtaataaactttaatgatttctgttattgataaacaccagcttatagtttatagaattggggtttagagcacttctttcatgaagagtgcacaagcactctcaaaactagtgtgtaacctggtgacattttggtaaatatgatacgcctatcatatagacactactctgcaaaacaaaaaactggagccagttgcttctttcgtccttcgatttctttcataaaatgattggtggtttgttacacacatccacgagattaaaaacatgttatactattcacttgatattcataatggtttctattttaaattttaatccatatacaaaatgttgcaagttttgtagaaattttacagtcacaaaatgttatcttttgttggcaataggaaccaagacttaacatacataaaacttatagtcttctagtgtaaagactaaacttaaaatgaaagacaactatatagaccaaatacatagtttaacttcgaaaatattagactgaacaaattgattcggagagtaatgagcatatctaaagaataagctcgtcatcaaacataaatgactatctatcaccaggggagcttcccgtattactaccatagcctctcgtgcaaatgctttcgtctattagtttcatagaactcagaagaaagaatcattgagcccactcctgcatggctgcattctatcaagacaatagcatcctgaatctgtttaaatcgatggttgaatgtcaatactgagttatcaaatgcacatcatatagaattcttgtagaaacaccacctgtaaaattgtaaaaacaattcttggaaagaaacactatcagtttcagaatcgtaccaattgaaatgtagagtggtgtagtctgatctgatcactacctacagaaactaatcatatcataatacgtaaagagagtggtcaggtcagtttacctgcttgaaactaaaatatcgtatacatcaattttgaaaagaaaaaaaaaggattgtcaattggtgcatataagcaaacattagactgcctcagtcactatgctttcagctttccgctaatcccacgtttgggccaaatacaagggacagaattcttcttcgctgcaactgaacactgatcactccgaccacttttattgctcagctctgtctggagtttccgtcgcctcattctgttctctaatcgtattcctcttaatgcacgggctctccgttcaatttccaaagcttccgtgaaattccagatcctgacaacaccttcttcacctccacagacaattcgttcagctcctatatccacagagaaaagattgctcttaaacccatgcaacatcctctgtggaggctctactatgtctccacccaaattctttccctttgaaactctcttccccagagctcgcttgctaatcctcaacagctttctcacatcaattagagccagcttgccatcacttgatgcggaaacaagccatggaaactcaaaggcaagggaatacacagcagccgagtgaggaacccatgcagcaacatgccaagttttagactcatagccaaccctaacaatctcatacatgtgaattgcaccatcttcacctccagtaaaaaggaagtcccctgtatggctccgtgccaaagcataagtattaccaacattaacattatgaacaatggtcaccaaagtcccactattagtatcccaaacatacacatccgaacctgatgtgctggcaacagtagtatcatgagggacaagtgcccagacccaatcactgtgcctcaacactgcagtacacttcattgaatgacggtcccacactctaacagtcgtgtcccatgaaccactgtaaatccttgtcaagtctaaagcaagtgaagttataggaccttcatgtccccagagtcgaacctcagtattctggttttgtgtggctctaagttcaaacaagtgaggcaggtcttcaacagccctccaacaatgaatgaatccatcagtaccgccagcaaccaatagttttctatctgctgcaacggcacgaatggtgcagccaaggggtcgtgatgatgcaattgacaacccattctccatgtcccacatcctcacaacagagtcatacccagaggtaaatatgaccttcgcagaagccaataggaaaacagtccgaaccgcttcagtatgtccatacaacacatcaatactataacgtcccataaaagtcttactcctaaactccctttccacgaaaagttccctccatgacttatcatcatacacaacacctgaatccacagccaaggaagctgccggaagcccccacctttcacagtagaattgcttccaagcatggtgctcggacgcaactctttggaaaattgtggagacacacgaaacaacaccaagatccttgggatcaaggcaattgagaatctcagatatcaatgccggatgaaggtcggtgatggacaaaccacaattgaaaaccacatcaccaggaattgaggagtagttcaaagcactgacaggggctttgatgcctttcttggaattaatcttggatgctccctttaacttcacacccttcccagattcaggtttggtagcaggcataaattttgaggttgctattccttcagtgaaggatttgggacaaagctggagattagattcaactatgcctatgcctggatttgctattaagtgtgctaaactttgataaacctcagtaccattcgggcactcaaatgccataaaaaatgaggatcctactctatgaatcaaaagggttgaaagctcaaaccacagaacgtaacaaattcaaaattcccaaacagaagccgagaaaaataacgaatcgggaaacctgaagttaaccctaagctaagcaacaatcgatatccaaattaagggtggaggaatcctaaaattactaatggaattagtgaaaaataagaatgattgaagtttgatgtgatcaaaagggaaaaaaagaaaaacctaaaggatctaattaagaggaggaaaatagaggggaaaggaatgggagagagatcgtaaaataccttgagaagagtgatgaagcgaagcgggagcagagagattggggtaagaaaatgcaattagggtttgtgttgtgtggttatgtctgcgacgacaaagaaagaatgagtatgagattgagaaaggaatatgccaacgaccttctggctaccttttccaggacaactcaagaaaaaatatttaaaaaaaaacaaatactatcaaattaatcatctaaaaaacaatattaaattaatattatatcaaaaaattaatttatcaacaaattattttataatatcattgtggttttcatagtgacattttagattttgaagaattagtattttaaaatagtaaattagtaagaaaaacttttaaatcttaatataatgatgattaaaattactatattgttttttcttacttctttatttaagaacactttttttcatttctaacttacaaaaatgaacacatgtcaacattatgcacacatttcttcgataacacttcaaatttgaggagctcaaattatatttaattcttatatatacatctgttattgatcattttatttattaatataatgtgaagccaaggtaactttttattgaatgtctatcaaaaacattttgcactaatagtattagctagtagcacttagatttattttgaattttggcacaaataaaaaaataagatttaattacttagtctttaaatttaaaatatatttttttagtttctgaaatttaaaaatactttttttagtccttcaattttaagtacatgaaatttttagtattttctgataaataccaatttaagcaattaaaaaataaaaattaatttaagataactaaaaattataaaaaatgtaaatttattaagttaggactaaaatatgcaaattttcaaattatagggaccaaaaatatattttaaaattacaggactaaaaaaaaattcaaaatttaggaactaaagcaataattaaataaaaaaattctaaataaatcataacataaagctttttttctatcagatatcataacataaagttaactatatatatatatatatatatatatatatatatatatatacttttttatgcatgagttaactatactttgaaaaacgctgtcctttaaaaaaagttttggaatccttaaattttatttacaatatataaattataatttatattatccagttcatcgtgcatatattaattttttgttcgtatcgaaaataatcataagatcgagatttataaacacatatacactgctcaagggttaaatctttgtgattatccatctatttattctaaataatacaatttattaattaattagtatctttgacttattttttataccaatgaacaactgaacatgttcccaattaatatgatgatcttaagagcacactgtgtatctcatgattttgtatttaaagtaaacaatattgtactccacctcttactcagaattagtgatcatcagtctaatctctgggtattaatgaattataataaccaatcactactgcacgcatataacgcatatatgagctcagaaatattgttgatacagacgaaagaatgaataaattttcccatcttgatctgaatttcgatatgcatatgcaataatttagaaatattgtattcatatatacgatccaattttataacagttttatgtatcttattggacttttttttcctctcgtattattctttggttcgagttttccaatatattttttctctcacaaaaaacaaaaaactaccactgagttatgattagcatttgcagcagcgaaatataatatcctattttggctccatcagttacgtacgcatagacaaaaactcatgtatctgtgtaagagaaaagagagagagaagaaaaaacgtacctactctcaatctctcaaacacacacaatgtccggcgacgaagccaccgccacaccgcaaaatcccaggttagcataacagggacgtggagctttttaacgcggcgagtgagtcatgcaggtgtttgtttgcgaggagcatgcatgacgttaacgccaaggctattttgccaaatcaggagtctcttgaggctttccaaaagtgttatgtgtaagggcaaaaggaggagagggatgaggagtagggaaacgaagaagaaaagaatttgtcaaattattcatattctcatgaattgatccttctaaatatttacaaaatcctaattttgaatttaaataaataacaactcatcctaattttgaattcagataacataatgaaaatttaagcaatgattatcaaatcaactgatttgagattaatggatataatctataagatgtattggactcttcatgatacacataggcttttgggtaacaatctggtccgctatattatgcaaaagaatagcgaggttgatcgtacagaactccccttcactcatcatgttatttctctttaagctgctgcttcttttcttctcatcctttggttttgtcattcttgacttgggtactttaatttcattccattgccatatgttgagctacatcatttaacctaatagtaataccttgtaacattcttttaagaacataggacaatgtttatttttattaagagagttaactaactataagcacttaggcgtgatcctgtgcatacaagagacacgccacttgtgtcagccatctaggatcaaaagcaacactttgggtagatggtgcgatcaccaaaccatgcatgcttatttttctactgtcacagcaatgcaacactttgttgttgcttctctaatttcaattattcaccatgacttttggatttagaatcgattttgtttgatatccaaagatgcaccaagggaatgtaggaatagcttccaagatagagcgatatcataggaacctgaatagtatcttgtaacattcttttaagaacgtacgacaatctttttttaacttaatttgctttcatcacatgctctgtttaatttaggaaagagtaaattatgaatgtccttatccaattttgaagaggaggaaagagataggtagtaaaacagagaatagaagcaatgatatatcttgaaaaaggaaagacagatataggaagaaaatgagggtcaaactagaaaattaggatcaaagagagagaatagatgtacgaatataaattacttttattttatcatatatatttttccttttcatcatgtttatttaatggttatttaatggaaataataataatgactatcattattatataatatttttttaacaatttttataaataaaattagataaaatagggaaatgtgtgagattataggatgagtaataagattgaggtggtagagcgaaaataacgttaccttttattacgtatatatattaattagtggaagaataatatttctaatttaatttctcaccccaaaaaactaatatttctaattacgatatttttgtgaatatgaattctgctaatgtaatattataccttaaaataaacgtcttattaaggtgctttgacttaattgatcttagccattattttaaaatatttttaaaaaaatttatgagtgagaaactaaaaaggttataaaaataaaattaaaaggataaaaactcaaactttaaaaaaggataaaatttgttcttaagaagtgatgattggtatcatattctttgggataactgggaactaaaattgttatttaagaatttatggatatagttaaaaatatgtttgattacattttaatattttttgggacaattttttataaataaaaaatgaaataaaaataagtcaaaatgaaagttacaaatattatttttttcatcccttatcatgagaataattaaaatctacctaaaacttgaatataatataacttttcatgaaataaaagatatcctacaatcttttttatgaccttctaattaaagaataaatattttgctttcgtattttcagaaatagaaagaaaatgacattaaacaaatgtctcattatataataaatataaacatcattcttgaataagagcgttttataaaagagttattattttatgaggataattttaagaaatatttaagagagagttaattattaaaaatgaaagtgtttttgttgaattagagtgtttttgtaacttgtctcacttggactttcatctcaagataattaatgtcacgacctcacaaacaatctctttttcaataattattccgcggaaaatcaattgttggaccgagcgtttattattaagccaaaagttatagatgataattaggacataactttttgacttaacccatctaaactttccgttacgaaacaattaatgctacaatacacaaaggatttttaggagttattattttttgaacaagaatatttttaaaagttattctaacttttattgagtcacgagtcttatcctaaatctatatattgagtatttaaaatggtgtattacatttcgaggctaaattagtcttttacctatttaattttaatttaatgatgaaagagattataataatataatataactagattagatatacatttatattagttttatttaatttttaaaaataataataaggtatttttttcaacaataataaaaagataattaaaaatagaaaattagacatgtaaaaaaacatattaaaaaaaaaagagagaagtggaaagtgaaaaatgtgaaataataaaatataatcataaacaaaatgtacggtgtatatgcgattgtggaacccacagcgatggatggatgatgcacagtgcacgtgagaaatcccaccacaaaagacagaaaaacgaaggaagttcccattaaaatagatttcgatctaagcgaatcataaccgtaagatattgatcaaacggtaaggatgacgtgtgtactcatatctaacctatgcagcactacatccactcactctcacgccacgctccttcctccctgactctgcaaccgctcggagctgcggaaccctaactctctctcattccctcaccgttcacgcgtttctgcgattcctcaacccccgatttggaacactctaattatttcacgagctttattaacaccacacttagttttcatcgctgtaagttatgacttccaatttttcgtttaatttttacactgaattttgttaccgttactgtttttattgttttcttttaacttttgtgaattttacttaaatttttgtaacttctattggctacttcatctctaggtatgcgttttgacctatttatgataatcaatggtgataattaattgaatattaaaattgtgtgttgtagctatgctgttatggtgtttagcttaaacctatttgacattgaacttttattccgttagcattgttcttggctatgtcaaatttctgatgatgcctgtcagttttgaattgttattgtacatgggacagatttatttttgtgtcacaccttaatttggtaaataacaattgtcttttaatctgaagaagctcacttttttttttctttttcttttttattggttcagtctttgttttgctacattctattattaataatatttgacgtttacttggtgtataggcaatttaagacaacccatctatctatattataggattaaagcatgcaaccctggctacatacaagtgataagcatgggagaaggaagtgaccgtcaagctatggcagacaatggaaatgctgaatctagtgaaggtggagttagtagtgctgaaaacaactctggttctcatgttcgggttggggtttctgagccatatgtgggtagggaatttgattctgaagatgctgcaaagactttctacaatgagtatggaaaacgagtgggtttcagctgcaaagctggcccgcatggtcgttctacagctgatggggcaaatatgtaccgggactttctgtgtggcagggaagattcgaaaagaaagcctcctgaaagctgcaatgcaatgattagaatcgagctgaagggtcaaaataagtgggttgttacaaaatttataaaggagcatagccattccatggctagcattagtaaggtgcataatattcggccacgtaagcccttttctagtgttggaaaaaccatgcctgaaacttaccaaggagtggggcttgttccaagtggtatgatgtatgtacctatggataagaattgcattcccactaaaaatattcatggaattaagaagattcccgcagctgttgctgttgctgttgctgaaacaaatcagccggttaaaagtcatacaatgatgaattatgctgttaggccacctactcgaaagaggacattagggaaggatgctcacaacctgctggagtactttaagaaaatgcaagctgagaaccctggtttcttctatgcaatgcaacttgatgaagataatcatatgtctaatgtgttttgggcagatgcaagatcaaggactgcttacagtcattttggtgatgcaattactctggacacaacatacagaataaatcaatatggagtgccatttgctccattcactggtgtaaatcatcatggtcagatgattttgtttggttgtgcacttcttttggatgattctgaagcttcttttgtgtggctttttaagacatttctgacagcgatgaatgaatgttaccctgtctctatcactactgatcaagacagagccatacaggcagctgtttcacaagtttttcctcaaacacgccattgtataagcaaatggcaagtcttgcgagaaggccatgaaaagttggctcatgtatgcaacatgcatccaaattttcagattgaactttataattgtattaatcagacggaaaccattgaggagtttgattcatcttggaattttatcatcaataaatatgaactcacgaaaaatgattggcttcagtccttgtacagtgctcgtgctcaatgggttccagcatattttcgtgattcattttttgcagcaatatctcctaatcaaggatttgatggttcttttttttatggttttgtcaaccaccagacaacattaccactgttctttaggcagtatgaacaagcattggagtgctggtttgaaaaagaattagaatcagattatgagacaatttgtacctcccctgttctgaagacaccttccccgatggagaagcaggctgctaatctctatacgcggaaaatattttcaaagtttcaagaagagttagtggaaacttttgcttatactgccaacagaattgaagaagatggagaaaatagcatattcagggttgcaaaatttgaggatgaccaaaaggcgtatgttgtcacattaaacctttctgagttgagagctaactgtagttgccaaatgtttgagtattcaggcattctatgtagacatgttcttactgtttttactgtgactaatgtacttacattaccatctcattacattttaaaacggtggacaagaaatgcaaaaagcagtgctggatcagttgaacttgctgatgaatcacatggacccgagtctttgacatcacgatatagtaacctttgttgggaagccatcaaatatgctgaagaaggggcattgacagtggaaacttatgatactgcaattagtgctcttagagaaagtggaaagaagatttctttcatgaggagaagtgttgccaaagttgcccctcccagtcatccagtcagtgggactgcttttgatgacagaaaatcccctacttcaacagcagatacaaaccctctgttgtggcctttgcaggacgaaataacacagaggtttaatcttaatgatgctagtactcctgttcaatcagttgctgatctaaatttaccacaaatgaccccagtgtctctccagcgagatgatggtccacctgaaatggtatgtgaaggagaacctcttttcttctgtttatttgatatattcttaggattggaattggactgcatggcattaaactgttccttgtgctttatcatgtaggtggtttatccgtgtctgaaatcattgacgtgggtaatggagaacaagaactcaacaccagggaatagagtagctgttatcagtcttaaggtgtgctgataataatatgaacgatgaaaaatttgtagtagtactcatgagtcatgatttagtttagagctggtttatatacctaagcttttgcatgagaagtttgagactcaaacaacctttgcccctttttgggtataaatatcttctgtaacatttaattgtggcagggtgtcctgctttcatcctcttgcaatattttaacaaataacaacgatgtgaggatcctaagtcctttaaacatattttgaatgcagttgcaagattatagcaggattccttcaacagaatcggaggttaagtttaatctctcaaaagttaccttggaaccattgtttaaccatatggtcaacatcagtgatcagctttccataccaactaggaagtttgctgtattgaatctcaaggtgtgtgattttgttccttatagatttatctttctcagccgtatgctttgttgctttagtagtctagtactagaaaagcagggattgatgctgctttgcactttcatgattaaaattccttaaagcacttctcttcttactgaatggctgtaaatgagggtgagccctggcacaacggtaaagttgtgcattagtgacttgttggttatgggtttgaatccggaaacagtctctttgcatatgtaagggtaagactgcgtaatatccctcctccttaccttcgcatagcgaggagcctttgggcaatagggaacttattttttttttttttttaattttatatttataaggtaaggttttgtgtaaggagtacatactattgattggattactaaggaagagaattttaattttatttaaattggcaacaaatgaaagggaacagaactagtctgtctgttgtttttcagggatggtggtattggtcaataagattgattattggggaaattgttaagtatgatcacattcatattggctattaatgaatgtatcaaacatgatgtggttgaaaatgtagctttataaaatgacatgatgctgttgaggcagataacttgtaatatcatggtatgacgttatacttgattttttactttaatatctttaaattggcctaaccaaattcagtttaaaatataaagaacattcatagggataaatacttagcctcattcatagggataaattggaggccattttttgatgaaaggagcacatatgtggagtaatgattgtgttcaatgtggatatgtctagcatttttatttgattagggtgaaatcattgtggaaatgatgtaagatctgttcattgataggtcatatatatgtccatataaaaaagtgtgcatttgtttttttctttatttttttcctcaatggcttgtgtctcccccttcccaaaaagaataaaaggaaagataaagagaacgaaagccaaaaaaagaatgtcatcaattgtattatttcttactgtatgggggattgagtgcatgtttgttacttgttattgtatggaaatctcaccttaaaatgttttctttgatttttggtctatgtacttcgacaaacttttagattgttgaaattctttaaactttttcagcttccagtcgcggagactacttctggtgcaagtgaagttaagtttcaggtgaccaaggacacactgggtgctgtactacgatcaatggcctatatccgtgagcaactcttgggtcctgtaagttgtttcctgttacctttttctttttatacaatgttttctgttacctaaataagtgccaccaggcgaatcaatgtgttaatttttcttttcgtgttctcaaatagttttttcgcctttattttcttctgaaaaatatttcgtgcatgttactttgtaaaataattttgaaaaaaaaaaaataagagaacacaatcaagcacacccgtaataatgcccgataaaatctctgtttatttcagtgtcttttcttgtatattacaattacaatttgagaacactttgcatacatattcattttcttgttataatttactttagtttaacctaaaacctcatatttgacagggtgatgtacagacagaacctatgtcaaaaaggcctcgtaagtgaagcggcaaatttttgtttcataccaagatggcttcgtgatggccaagtggtgaccactgaatacacaaatggcttagaaaacgtagtgaagtcttttttttttttttttttttttttttttaaaaagtttgttgtctaaaatatttgtgtagatgtatcatatcataggcaacagatttactttataggaaccgtttggaaaatcctttccagtcaccggggtggaggagcattctccgaacgaataacgagtagaaatgggtttaggaatttgggagaaaaaatggcaaacaaaagcaggtattttttagtgacaaaattataatttttttttttttttgtaagtttgttgtctaaattattttttagaaatcatatcttagtttggtggcaaaattaccttatgaatagtaactattcacaaaaaaaatcattttagtatatattaaaaaacattggatgtaaaagtgtaaacagcctttcaaaaaaattaaattataaacgggatagtcattatttcgatgcggttggcatgctctggaagatatatgaagtgtaattcaaataccaaactggaattaatgatgctatttgccaatacaaaatgaatttaaatataatggaggtgtaaataatttttacattgttattcaattataatttttaatatacagtaagattgttaacttttattataattattttaaaaattatacttaatataattttgattactgataaaaaaatagttttgattgattaatagaatgaaagttttacatttttcaatgaaaaacacgttttaatacagtttataccaattctaaacgcggcgaaacaggaaaacaggaataatggctgtaacttataataattgagtattgttgatgatataagcgaagtagtaggacgatatgtgcacttgcagagattgcgttatacacatatattaatggttttcatgagttatatcaatttatgattattatatactaaaaagttaacttatggagatcatatccattcacgttctatattgtttttgtttacaaatcatcatcaattaaaaaaagtgtacttttgatcttcacagtgacatgatcaaagtcaaatgttaaagattgctgagcagttcatgacaagtatgcttacacaagcaactttattatatcattcaaattccaaattccaaattctaaatgcaacatatcacaaagccttgggtgataaaatggttctaacaagatcatccattgctctaacagaagaccctttttctttacctttctctgttatggcttctctcaagtgagctgcaatttcattcgccttctccttcatctcctttcccttcccttcttgctcaataactatctctataaccttcttaacctgctccccagagatcacagtttccacagttcgagtgagctcaacagccacacccatttcctccaccaacatcttcacattgtatgcttgttctgcagctagtggccatccaatcataggaaccccatagctgagactctccaacacagagttccatccacaatggcttagaaaagctcctgtggaagtgtgtgaaagaatctccaactggggtccccatttgtgcaccaaaaggccacgtttggtgcctctcattctctcttcaaacccttttggcaaccattctgcaatgaactctccattgatgtcaaaaccaaaaggtggccttatgacccaaataaacgatcttccactctcttccaacccttcagccaaagccatcatttgagatgcactgatagtgttctgagacccaaatgaaatatagagaacagaattctcatctttcaaatccagccactccatacatgcttcaagggctatgccaggttcctttcctgcacgatgttttgaaccactgtgtgaagcaggtggcaagagaggccccacagtccaaacgggaagttgaagatagttcctgagaaggtgcaaccccagaggctcaatctcctcaaccgtgttgcaaatccacccatcagacttcatagaaagtgcagtctgtggaatgaagaactgtgaccactcatcagtgccatcagctgctcttagaaatttatgcaattgggtgcggtggaatttgtagttttgagggaaccccggaacatggaactcatcagaatctgtttttctgtgagggaggttggaccaaattgaaacataggccaaggttccataagcaccacaagtggtgaagcttaggttcctcatgcctaaactctttgcaacgttgttaacccagccaaggaacacgtcagatataacgcaaagtggagggtgaccctcttgttctgtgatctgtgatagcaaggagcgaagaggagcttcaaggctgagtgtcgaaagaaagagtttggctatgtgagtgagagggagcttctcggtgttctctatgttgggtggcaaaccgtgttgggtagagttgaagggtaactcagcaagatggatttcattaggagaagaaagtgcagatcggaggtattgaatgtttaggggtgtgttggctatggtgatggtgaagctttttgttctctgttggatttcccttgctagtgccaggaatgggatgatgtggccttgtgccataaagggtaccatcacgatgtgccccttcttctctgctgccattggagctagctcaatccttaaggtataaactcgtattcccttcacttggtttctgatataaaaaggatataaactataaacaaaggataaatacgtattttttgtccttgaagctgaaagtgccggaccatataaattaatcaaatgtataagaaattgtaaagttaatcatgtaaacaatttttaatctgttacattttttatatattttaattaaatttaatttttttatctatccagaaagcaggatcaatttatactttttaacactttcgggactaaaacgaaaacgagtatttattcaacttaaagcataagatgaagtagacatatggacctagcagtgagtgttcggcaaaaacgtgaaccactgcactccacgtactcactgcaatgtgcatgattgcatattataatttatatcttaccagcttttcggtgtcgtgggacatgcttaggaatatgttaggcctttcgtgaacgggaagtgtctttcgaacataggaaactgtaatgccaaggaaaaggaataccgaataagttattatacatcctgtcatagaaaataatcttaaatatcaagatgggatatgaaaaaaaaaaattataaatattaattatttgcttaaaaagtataaatgtatatatgtgattactctaatgagaatattcaatgttttttttcttcttttaagagtttttattttaagagatgttttttaaatgctttataaaaaagttgcaggaaatcaaaattagtacgtgcggtacaatattaagaatatgcagagtatcaatttttagatgtttgggaatctagtctatgtttggatttgagtttatccaagattacacacgcatgtttaattagctttagcaatataattagaacttttatcaactatgaaatgtattaccttgggaaataattagttgtactgttacttagtaatgtatgaataagtgattataacaatgaattaaattgtaataaaaacaagtaatgtgctacaggtattatattgaactagttgaaattgttgggtagacgtataatgtactcatcaagacagaaaattatgtagccaacagccaaacaagctaaccttaaccttgtgtgactaaggctccacaagacatttaaggttacttttagtttttttattagttcaaaaatttatttgattattcagttaataatttttaatagtttttattgttttttgaaatattaacttttagtttttttatttgttttttttcaatttatatcttcaatatatttatctaattttctaattatcatttttaaataaattatgattttattatttttctgttattttacactatccattacgtcttcaattaatttcatcgagtatatataatttaataaaataacattttaagtttccactaccaattaccaactaattttattcaacataacctacaccttatgattttcaatctctttcaatgacattggagtttttggctggacaggtttttaacttttattttccttatttctctctccttcaaaccaaatagatagatagtgcggacgtttataacttttcttttccttccaaggtagtcaggtcccccagcaccgaaaagctagtttgatttgagtaaggatatacgaatatccttattattataaacacttctatgctattagatatatagacacctaaagagagagaaagagataagaagtgtaagaatactaaataatatgatttgataggggaaaaaatgtatcaaaatagatgtttatgatataagaagtaatatatgaacacctttttataataaacattaattccatcaatttcaacatacttatacttttttctctttatctttctaagtgttaattagcaacttattatatgtgaaaagactaacacgacttgcatgagtgctgaattgttatatcatcctactacttggtttatatcatcaaatattcgaatgtgctgaattattataaccacaatgttcctgttttcttgttccaccttcagaatttattgtcttatcactttcgcttctctctatttcaaatagaaagctgcacttcttgtttgcaatatgattttagtgcctatctaatctatctataatgttacatccaaggattggaagagattcccttttttttttactgttctcaaaagttattatcagagttataacagaagctaacctagagaagaccaagtaacaaactaatttgataaaacagaaaattgactaacgattgactgagttattggttaactctaataatgatattaatgtttattgagattgatgagggtatatgggcatgctttgagtccttattgttgttccatcattccggttaagagtggtcaatatatgaaggggtttgttgagttgtgagtgctaattctcttctgtaaaagctctgttcgcagctgacaaagagggacggaggctggttgaatgacatttgaatgattattgttgttggcataagatcaaatttcaagacaattaatatactggaacagttttttttttttggttattttaagaaacaaatcttatatgattattaaaaaatacttatttttaagttatttttttaaagtttaaacaaactcatcccaagatctaataccacaacttttcagttcttcatactttgtttatgcataatcatgttgaaggataaattgattgtcatcaaagacaaaatcatactttgctgctataaacttatgggatgctaatttatttgtcaaagttgatgacaaagttaaggtaaatatagatattaaaaattctgataattatttaaaaaattaataattagcaagtcatcctattggttaaccatcatatcttcgaaccattggatttgttaataatatatcagacggtacataaacgtctcacagggtgtgaaaccattggtttaaaattcttgatataatttgttaggtatattgggtcttatcggtattggacacacgtgttatctttcctttttgatgtaggcctaaacccttagccctgaggagaagaatagttgccccacacttaatgagtttgctctgcattgtcaaaaaattaaaagctaaaatggttctgtttcttttgggcttaaaccatagtgactcacattgcgtatttgaaattgggtgacctattcgtatggctctttacttttctaataaatttgaaatctccaaatgctttgtattcttctttttcggttctcccttttacttagaggactaagttttgtttcatggttcatgagttgtttgtttccttgtaccttctttctttttagaacaagtttggatttggcctgctcgctctataagtataggtgatttcgtctatctattggccatgtttagattttctctagaacaaggcgattctgtattctttttctatcttggttaacatcaaattgaaaccattaatactaattaatcctactatttataatatctaaattttatgaaattgaacattaataaaaataaaatcatataattcatattttaatatatttaaaaaaatatattatatgtcaatttttatatataaataattatcaaataattttttattaatataaaattttatagatatgatatacataaaaaaaaaacttttaattcaatgatgaattttgaaactatattacatattgataatttggttcttaaaatatgatatttgatgtcagtaatcataaaattatattatttattgacaaattagtatatgacatacatgatttatcataaatggttaaactaatttgttataatatttatttatttataaactaaattgattattttgaaaatgtgaacactaaattattggcacaaatacatagtttatggactaaataatttacgaaaaatatatttgtacattcatatgtcatttcacactaatagaatgaaaaaagagagaaaaatataaatatgatatatgatataatgtgacaagaagaaaaagataaaaataaataaaatgtattaattgaattttaaaataaataggtgttgaatggtcccggcacagaaagttggaaagttgaagcctaacaggctacgactctgtaccatgtcacgttacttcttcattcatctttttctcagtgctttattttgtgaaacagcaaccaagacaacaaccattttcttgtaccaaagccagcgcagggtgtagcccataccattccttgagctcgttcaaatgacggagacaccaaagaagaagaagaagaaggggcacgtggtgatggtacccttcatggcccaaggccacatcatcccgttcctggcactagcaaggcaaatccaacaaagcacaagcttcaccatcaccatagccaacacacccttcaacattcaatacctccgatctgcactttcttcttcaacttctcccaatcatcaaatccgtcttgctgagttacccttcaactccactctacacggtttgccacccaacatagacaacacagagaagcttcctctcactcaactaatgaaactctgtcatgcatcactcacccttgagcctccccttcgctccttgatatcacagatcacagaagaagagggtcaccctccactttgcacaatatctgacgtgttccttggctgggttaacaacgttgcaaagagtttaggtattaggaacctaagcttcaccacttgcggtgcttatggaaccttggcctatgtttctatctggtccaatctccctcacaggaaaactgactctgatgagttttgcgttccggggttccctcaaaactacaaattccaccgcacccaattgcataaatttctaagagcagctgatggcactgatgactggtcaagattcattgttccacagattcaactttctatgaagtctgatgggtggatttgcaacacggttgaggagattgagcctttcgggttgcacctactcacgaactatcttcaacttcctgtttgggctgtggggcctcttcttccacctgcttcactcatggattcaaaacatcgtgcaggaaaagaatctggcatagcccttcatgcatgcatgcagtggctggattcgaaggatgagagttctgttctctacatttcatttgggtcacagaacactatcagtgcatctcaaatgatggctttggctgaaggattggaagagagtggaagatcgtttatttgggtcataaggccaccttttggttttgacatcaatggagagttcattgcagaatggttgccaaaagggtttgaagagagaatgagaaacaccaaacgtggccttttggtgcacaaatggggaccccagttggagattctgtcacacacttccacaagagcgtttctaagccattgtggatggaactctgtgttggagagtctcagctatggggttcctatgattgggtggccactagctgcagaacaagcatacaatgtaaagatgttggtggaggaaatgggtgtggctgttgagcttactcgaactgtggaaactgtcatttctggggaacaggttaagaaggttatagagatagttatggagcaagaagggaagggaaaggagatgaaggagaaggcgactgagattgcagctcacatgaaagaggccaattcagagaaaggtaaagaaaaagggtcttctgtgagagcaatggatgatcttgttagaaccattttatcacccaaggctttgtgatttgttgcatttagaatttgaatgataataaggttgcttgtgtaagcatacttgttatgtactgcccagcaagctttagcacaagactttggtaatattgtcattatgaagataataagttaactcattttaatcaatgatttgagttcagcataagaggtgaatgaatatgatctcagcaagcacacgtatctatataaacttttaatatataataatcattaattatgaggatgaagttagtgtagcttaaattgtttaatgagtgagaaagaaagagatgaaagataagtaattaattaatgatgtagtgtaatataaagagagataaagagaaaaaagaattgtttattgagtgttttaaattttgttatcaaaatataatcactcaaatattaacattgacatgattgctgaattgttataggaaaatattttatgaattagatgccaagggagagacagaaaaaagaaagaaaagtataaatttaataagatttatgatctgataagatgagaaagataaaaaaaaaaaattaaataataatgaaatatttaaaataaatgatagttgatatatcattcctcattcttttatcatcctactacttcgcttatatcatcaaaagtgctgaatttttattgccagtgtgttcctgttttcttgttccctgttcagaattgttttactttcccttctcgatctctatatcaaatgcaaaatctgcacttcttgtttgcaatatccaatatgattatagtgtctatctaatctatccatatcttttaatctataatgttacatccaaggatggatgagatttactttcttactattctcgaagagagtgtacagaaagaatgaaaacatatttgtattattgattgatatagagatacaagagatagtgaaccatttatacaaggaatggaaccaaaagaggtataactagggggtcaaactttttataaaaaaaacttaatgaaaaatgttacatagacacgtattgtattatttaacatttaaggagatggaaaaaaataaaaaaaaagtaatataaatatgataggatttataatgtgataagaaaaaataaataaaaagaatgagaaatattaaaggaatatttaaaatgatgagatgtttaatactctttcacaagcatcttggatttgtaataagtgctattaaattgataaaagttaaggtagttattattacgtcgcgtgatgagaaatgataaattgtttttaaaaaaattatatataaacactcatgtgttatatgacaccttgagagacatcaaagaagaccaaaagaaatataaatataataaataacataacttaataggaagataaaaatagaaataaaataaaagtattaattaagtgtttggaatatgtgaatgtttaaatataagcccttaatgttttaaaaggtgaattttgcaattttcattgatcattgtttaacgcatggtatctgatattgtgcttcatagttgtattggagttgatgtaggctcataaggtttttgatctcggacatgtattaggtcttacaaattgaatattaggcttattggtattaggtcaacacattgtctttccatttaatgtgagtctaaacccatcgagagtgatccaaaatagtagctctgtttttactatgcgttgatatgttcattttttttttataaaagaaatctaacaaaaatgaaattattagattatgaaataggaatataaattttatggatacatcgacactctaattatagtaataataaagtaatcattgaaatcatgtcttaattgtctgtcaagttgttcctttgtttaaaaagtaaacttttcatggctgcatggaagaagcactttcaagcattcaagttctttgatactaaggccaccatgatggattattctgaaacgttaaaaggtttcctccttaagaggcaatttgaggcacattttttaaatatataattgaataataatataaaagaattacagtatatattttaaaaaagcagtatcattgaattacacgtacactttttgtgttcagaaaatatttcctattcaaggcaacacataataaaagtgcacataaaaattgaggtgaattgagacgaaaaagaagaaaacaatagaaaaagaagagaaaataataaatgaaataagacaataaataatgaagtaaaaagaaaataaaaaaatatacttttatctataagaattaaacttatttaccaaagaaatttacataaactcatatacgttactcaattaattgagataataaatgaattaattaagggcaatattttcttatgaactgtaggttaagaaaaaaaatgctttcaaaataaataaaaaattgagtgtgcataaatatctttgtctgagtcattatcttttaggctaaatcacatttttaatctcctatatttctaaatttaggattttagaccctcaagtaatagtaatatttgatttccatttggttttacaaattaactattttgattcatctgtgttggatattagttaataattctaataggagttaataactaaattatactatttttttattttttccacccaatccatcttcatgcatttttttccctgtagttcttctaacgtttatgacttttctttcccttcttgggtagtcaggtcccgcagcatcgaaaagctggtctggttgcataggtaattgagtgcattgattcagattgttttttttttttatttttttgtgccctttttgctttattttgcacccttcttatcagaaaccaaaacaagagtttcacgttacttcatcatctcaggctctttgctatttcttttgtacacttcttagcagaaaccaagacaacaagagttgagtttagtgttcttataccacagacagcgcagggtgtagctcaacattcctcgatcgagctcgctccaatggcagagacaccaaacaaaggccacatcgtgatggtacctctcatggcacaaggccacctcatcccatttctcgcactagcaagacaaatccaacaaaacacaagcttcaccatcaccatagccaacacaccccaaaacattcaacaccttcgatctgcactttcttcttctacttctcctaatcatcaaatccatcttgctgagttagtacccttcaactctacccaacactccaacatagacaacaacacacaaaaggctcctctcactgacctattgaaacttggctatgcatcactcacccttgagcctccttttcgctccttgatatcacagatcacacaagaagaaggacaccctccactttgcctaatatctgacatgttccttggttgggttaacaatgttgcaaagagcttaggcactaggaacctaaccttcaccacttgtggtgcttatggaatcttggcatatatctctatctggtccaacctccctcataggaaaattgattctgatgagttccatgttccgggtttccctcaaaactaccgtttccacagaactcaattgcataggtttcttcaagcagctgatggcactgatgattggtcaagattcctcgttccacagattcaactttctatgaagtctgatgggtggatttgcaatacgatggaaaagatagagcctttggggttaaagcttctgaggaactatcttcaacttcccgtttgggccgtggggcctctccttccacctgcttcactcatgggttcaaaacatcgttcaggaaaggaaactggcatagctcttgatgcatgcatggagtggctggattcaaaggatgagaattctgttctctatatttcatttgggtcactgaacactatcagtgcatctcaaatgatggctttggctgagggtttggaagagagtgggaaatcgtttatttgggttataaggccacctgttggttttgacatcaatggagagttaagggcagaatggttgccaaaagggtttgaagagagaatgagagacaccaaacgtggccttttggtgcacaaatggggaccccagttggagattctgtcacacacttccacaggagcttttctaagccattgtggatggaactctgtgttggagagtctcagctatggggtgcctctgattgggtggccaattgttgcagatcaaccttataatgtgaagatgttggtggaggaaatgggtgtggctgtggaacttactcgttctacggaaactgtggtttctagggagaaggttaagaagacaatagtaatagttatggattatgaagggaagggaaaggagatgaaggagaaggcaaatgagattgcagcttacattagagaggccaacacagagaaaggtaaagaaaaagggtcttctgtgagagcaatggatgagcttgttacaaccattttatcacccaaggctctgtgatttgttgcatttagaatttagaatttgaatgatataataaagttgcttgtgtaagcatacttgtcataaactgctcaccaatctttaacataagactgagtctttggcagtgtctgtatgaagatcatttccagaatttgcactgattatttaaagattcttatacttgatgttgctcaaacaaatttgtgtttaataaaaggtattgggtgatttggaacaagataataagtaggccaggggttatcataaattgatttggattggtttcagaacaaaagatcattcaatctaagcataaacgtaaattgtgattccgtttgatttgagtataatattaaatctaatttgattcaataaaaaaatcatttgcactcaattcatttatttatttattttaagacaacaaatgtcaaacaaacttggatacatgggaaaaggaaatggttatgaaaatactagtaaagtttttttgagaaatagttgaagaatttatcactacatcaattaaatttcatcattttttctataataatattactggatcatgtacattcaatgcatgcatgataattatttgtgttactagaaatctatacttctatggtaaagaatgatcacaacaaaagagaattttttattttgtattaagaagggaactaaagaatgttagatatacattttttaatgtatttttcattattaacaaaaaattattaaaaattacaaaaaactagtttccaaaaagtattaaaataaactaacagtgtaaaaagtttcttcatttttgaatgtattaaaactgtattcttcatttttgaatacattattaaaactgtattcttcatttttgaatgtattcttcatttttaattttcttctcatctctctttctttgtttaatcttgggcagaccatttgttttatccgtaaaaattaaaaatagtgtaaaaagtttataacactcacacaccttgtttaactaattaaattaaattccttaactctttctctccattttacaagcaatctaaacgatggaagaaacataaatttgatcttcttagttcttattgttttttcttgacataaacacagcttatggagtgaataccaattattttccttcgaattttcactggaccctttatcgtttctcaattcccttcctccgctgaccaaaagaaaacaacaagtcacgaagtcaatggttaattaggcaattgtaggtaaacaaaatgcatacaaaaacaataatttaattaggcagaagcctgtggactataataaagtaggtaatagttagtaaatgcacaaccatttcatcatccaagtatccaactactgttttgagacgcgctgccatgggccatactaaatataataaatttattttatgtttttttttctaacgcaacaaaaataataagatggaaagatcaaatctggatgaattgtaggttgttttgttacaagcaaatgcaagcttgcgctaaaaatattgaggtgtgtgtttgtcaaaattagttttgtattaagtagaactaatttttaaaaagcagtatcactattttgtacgaaatcatttagtaaaattacacaaagtgatgattcatggatgtctaaattatcatttgtgccttagtaaattatcacatcaaaatgtataaaaaataattaatagttgtttcggtaatgtacgtcaaagatgtataaatagatatccaaatacacaaaacatacaatttatcggttaaactttactcaccatacatggtgaaagaaagtagtgaaatatttatttttacaaaaactttgaaacaatgaaaaagagaccaaaatgtattatcaaaatattctaacgagaaaggggagaactatcaacaaggaagaggtaggatactaggatgtacaatttgtaagatctagtatggattttacatgttttatagttatactcaataattctcttagtatgtgtttaaattggtggtgaattgaatttaatataaattttagaagcaacaaataattacttttgtagtgaattcagtatgatttttcactcattatgattttacactccccaaaccaaatacactaggctttgagatacgagaaaaagaggatcaaggtaaccattgcaaagaactcgatgcactgtttctcttcaaccatttgagcaaaatgctataaaagaaatatgaatttattctgagcataaattaataaggttggacagtaaaggtaagaggaaacattaatctatctttttcatttttaggagaagtgtgaatttttaatgtttcactaataatattttattctgggcataaattaataaaaaaatattattatatttacatttttattccataaaaaaattacacttttttttaaagaaaaatcatttgttcacaaatacaaatatattttttcaaaataatttttttcaccatcaatttcaacaacacaaaaccaattggaaatttgttacaatatgtggtgagttatagattatcagccaaaacggttagctgtccaaccccaactgcatcacattaatgtatgcatatgcatggcttcatcttctcctgaccatacttcacattaatttatcttctcccatctaaaatctatatattatatattacatctgagtttcaattttcctaagctcacatttcctttgtgtttgtgagtaacttgcaaacacaccaacaccacctctctctgtccaattcaggtgattattcccctttcttcctccttacttcttttcctccaattgggtcattcatttctcagcaacgagcttttgttaagttttttatttttttgcctaattctgctgtgactcacattctctgttatcatcgaatcccgactttcttcgtcaaagttcgtatcttttgctaacttctccacactattactaaataaataaaaaagcttggaacttgaccattgttttgccataattattagaaattgaatgtggggttttctgctacattaacatgattgttaatttaatagctttgtgtaaaaaatcacactccttgcattgtgtttttggctgctgatgtgaatcttcgttttttctattttcagaccccctagttctgttggatcttgcatatagtaaccctttattgattcgcaaagatgaaggtcacagtggtttctcggagtggaagagaagtggttaaaggtggcattgagctcagcgattctgtatgtctttttttaccctctaaatattttactctcttttttgtgttaatttaattgttgtcatggtagttttggattttgatatctcgattgatttggagagttaggttttatctatatggcggaaaatttcccttcattttgtctatcttttcaattggcaaaaggggactttgttttcaagagtaataatttatggtttatccctttatttctttgcgtaggctactgtagcagatctgcaggaggcaattcataagcgaagtaagtgaacttattcattttctctactatgcttatgtataaattactttgtttttaaagtaatgtctgagatgtaaaataactgatatccagttagtcttgggcgtacaagggtactaaggtagttgtacatgtggttttagttgttttttacttgtgatggattttaacttattacactgagtgatatgataattgataacagctcctgatgttcatcgacgtttatcattcttactatgtagtatttattaagatccaagaatcccagatacataatatgatatggttatgatacagatacacatacaaaaattttatttttaaaaaaaaaaaaaaaacaagataggacaaaaccatgatacattaccaaaaatgcacaatagcaataacaacttggagaacacggaccagcacccagcgaaggagagagaaccaaaagaggagctagaaccaccagcaacttcagcaatgcagatggtttcttgcaggagattgttcatgagaaggaagatgcatttggttttggacttgctgtttgcaagccctagtggtgatgggggctcctttttgcaacacgatttggaacaacctacatgaaaagggaaatttaacaaaaaaatacactacatgtctatttgaaatgaaactgtattctgaggttctcagcagcatctttagccattttggtattgggtacatgttggacgccgatacatttgcttttttagagtatctgggcttcataaattaagatcctttaatgattatagcagcatgataacctagtagcattgagtctcagtattgtttattagattatagatccaagtctttgtcagtagctttatagttaaacctattctaggttgttgaagttgaatagaaatatttgaatgttcctcagcttatgaaaacataacccaattttaattgggtggtgaaataaaatgaaatattggtgatagcactagttcaatcctgcatgcaactcctgctactattgtatggctttgtctttccatcttagtacctctcttggaggaaaaaaaaaatgcttatctgtaagtgtatctgtgtctctaggcaccattggatttcatagatcattaacatgatttgtatgtttcacttacagccaagaagcacccatcaaggcagcgcttgacacttcctgtccaacccggatcaaaggaaaggcctgttgtccttaattacaaaaagagtctgaaagactatacaagtggaaattcagaaaccttaactgttgtattcaaggatttgggcccacaagtttcttaccgtacacttttcttctgcgagtatttgggaccttttcttctctatccagtcttctattatctccctgtctaccaatattttggctacaaaggtgaacgcgtcctccaccctgtgcagacatatgccttgtattactggtgtttccattatgccaaacgaattctggaaacattttttgtgcatcgcttcagccatgcaacctcacccctttccaatgtgtttcgtaactgtgcttattactggacctttggctcctatattgcttattatgtgaaccaccctttatatacccctgtaaacgaccttcaaatgaagattgggtttggaattgggatactttgtcaaatttcaaatttctattgccatattattctgaagaatcttcgtagtcctggtggtgaaggtggataccaaatcccaaggggctttctcttcaatattgttacctgtgcaaattatacaaccgagatctatcagtggttgggattcaacattgcaacgcaaactgttgcaggctatattttccttgtggttgctacttttatcatgaccaattgggctttagccaagcacaggcgtttaaagaaggtatgcctccttaccttttatatttcagctcactaatatggtttacagtcttagaaaaatatctaagagcaaattatatactccacctgaactttcttgtaaaggaataacttgattgtgctttttcctatactgtctggttttagattttgaggatttcaaaggtttgtggctaacttgattttcagactccatcatattgtttcttctgcttctatgttaaagttaaacatgtgaattcaaaaatgctgctccttgtaagaatataatgtttattgcttggttatgccaaggtcaactaaatatggattttgcatttttatttatttataaaattatcatttgtatggggtgaaaccatatcatatactataaagtgaaccaatattgttacagcatgtttggagacggatcaagcacgtggtttttcacatcaaaatgaatgctactatctttatgtttttcatattaaggacatgatttgttggttgtaaaacatgttcccaaacataatactagtctcttcccctttttgcatcttataatcatgaatcatgtgtcttatctttttcgatgaacctgcagttatttgatggaaaggaaggtagacctaggtatcctcgtcgatgggtaatattgcccccattcctgtagaagccaaagcaactgatgaggtcaccactctgctcacaggattctgagatttaaattgtagcataatggaattttcgtgatctctttttattagatatggatttgtcttgcaatgcttttgactatgaagtaaattgccaaattactgaatcagttttctgcagaatatttgtaatcatttcaagattgtagttctgaggattcttgtttcttcaaaatcttcatcttgttgctgtttaatttttgttagctatttccttttactgtctccaatgtttcattaatcattttagaaaattaaagttcaattttgtagctcatacactatgcaatggtgaggtttcaagagtcaaaaccactgatcttcctccacatttaggaacaaattttcgatgctcatgtagtacatactcctttggtagtttttatccttatttattagttttctcattttcaaaaaataaaaataaaaatacttgccaggtgtcataaatgtgaaggaagattcatacaaaaaaattcctcatttagggtgtctgatgcttattagtattttttttttttcatttgcacaatgaagtataaagtcgtgccttgataaatcctcttccgtagacgttgattgtttttcttagcccaaacctttgacccaacaaaaacctttactttttcgactgaatctatgactcgagtttatgtgcatttatatcttgtgtctattgtttttcttagcccaaacctttgacccaacaaaaacctttactttttcgactgaatctatgacacgagtttatgtgcatttatatcttgtgtctgctaatagcttcgttgtttgcaattcatacttaaagattgctaacattttggttctcgcatgtagtggggcgataattcattgtaatcatgaaatattttatctttaatttttatttgttgttttttttttatatattttgacaacacaattaggataagtaataatttagttcttgttttcttacaacatataactcagaagaaaatccgcgatggccaatttcttcacacccagggttaaatgatacaaatagcaaaatcataacaattccatctaagaattgatttattaccagtcttcagtgtgtacaactggaattactctctagagtttaaacctttatctatataagcttcatctatatctaaattgtgtactcaacaattttcttctattaagtctaatagatcatatacaatagcatttttgttttttgttattgaatcatatacattggaagaatgagattctagtgtgaagtttataagaccttgaactttcaactgcaataactagcttttgtggtatagttctctcaagatttttatcaaattttcaaaagatcctaacaattttttattttgttttatagcttctttaatttttagttttttttcattcaactaattttatagaaactgtcaaatagccaatgctatgctctaactgtctaaattaagagtcaattctgtctttcacttatagagaaggccttcctaggtaagcaaccgaccttcatttttcatgcaagagagtataacaggagtcaggagattagtttatgaaattataatcactagtcactttaatctctaaaattatttttttgggggggggggggggattagtccttgaaattagtaattgtcaatcattttagtctctaaaaataaagatatgcccatttgatttctaaatttcccaattatagtcattgtaattcctgatttttatgggcaatagtcaattcggttcctaataccagaggttaaatgaacttatgaattatgattgtcaaattcaagaaccaatcattaaattcaaggattaaatcaattgattctagcttatataaaaaaaaaacaattgattctatgatgtcagatcaaattaattgatagcgtcaattttaagaattaaattgattgacagttataaaagtcattaactaaaatttcttttttataaaatttttaagaattaaatgaacttaatttcaaggactaatctaaatctagtgctttaatcccatgattaatgaattagaacatgaatggtatctatgaagatatggtgtagacacgaggttatgaagctagaatagaattggcgttgttataaacttcaaggctgaactccttggattgtccatacataaagtattaatcctcagcctcaatcttttatcttacaaaacataacaattttccggtgaaataaaagtttaactatttattgttaatttatttttttaagtatatttatagtaagagtttaaactcatttcgatagtgtaaaattatattgacaatgtaaaataaatttaaattatcaatcaatcataaatcattattttaaaataattattttaaaaatgaacaaacttattgataaaaatttatgattaaatgactatttttttttaccgtgcataacctttttctcttataatcttatgttaatactatttttatcacggcatgaaccataaatccatatttgtgtgctccataatttattcaatttttttaacgtagcttggtaaatacaataatttgcccttacttttgagtgatagcaattacccactacggtaaacaactactcgaatatcaattttttagtagctcatatccgtacacatccccactgatgactagtagacggaaaaaaaaaaaaccctgaaataacatgtttatactatacgcataccaagtaataaataaataggtgaaaattgtagaacaagattccaaatttcacacgaactccagtcctccacagccatgcgatagttttaacccctcccaatgtataaaacgatcgtcagaaagacaatgcttgaaaattgctatctgcaaatcctaggttgatcagatgatgttcccagaatctccattacattttcatttcatgatttgtaggtccaaaaatcggtatgcttccagcaacaccaagtagaagaaacaagcatgcattggcctcacgaattaaaacagacactcaacccgtagaatgcacttcacatcatcttcgcattcctcgtccacgaccacggaatccacctccacgacctctgcccatggcacttgcagcagcatctccttgtgcactttcagactacagataaatagacaaaatcaaaatcagctgcataacggaagtagccagaataaaagaggatctggttacattcagaataaaagaggatctagttagtaggcataacatatttctgaaaatcaatgtaaaattcagatagtcacaagatagatccgggtagaacaattgcaacaataccaaaattgtccacaatctccctctctctctgtttgtccattgaataggttacaacttctaacttaaccatttatctcaagttcaagtatagcgaatgtagttgcattaaaactcaatggcactccatcgaactaaggtgggtcaaactttaaaaataataattattgacaggaaacaaggcaagggcacaaaatttttgtaaaactactaaaaaatttgggtacctcgtgttagaaaactttttttgtcattttgtaagagcataagcatttaagttaggaaaagaaacaaaaaatctctatcccataggtcccaccaataacagcattcccacatctccaagaaagagaatattgattcctgtctttaaagaattcagatgaggaatgaagcccttactgtctcttcccttagcaaaccatggaaaccccattcacatggagtaggaggaggataccattccaacacaatatgctaatcgatagagacccggataccattttcaaaacaagtacaacaaatttgcatgaaactagtactcattcctcaacgcacagtgataatatatgtacaatgcttaaaagagacaagcgtaaaacaattgagttgcaagaggatttgtgtagagaattcattatgtgctgctgctgcacatatcaaaaggtaaattataaagcattaccctttcaaaatacaaaatccctgaccaaacagagaaataactaacgtgaaattagaaaatacataatataatatgataataaaaatcaataattccttcaaattgtgcaaatctccaggaaataagttatgaacagaagcacaatcctcatctaatatacaataacagaactaaatttaccttgggatttttaattgtttcatccacacttaagataaggcaagcagcctctgttgcagcatttatagcattgatctgcaaaaatgttaactaacttaaacaccatgcacataaaacatcagaatcaggacatgatgcaaataaatgcaagcagataccttcacaagtgcaggctcccagacaaagttagcaaatgagtcagcaattccaccagttgctatgtccaccccatagggtgccccctcacctgtaacaagcagacaaatgagtatatgccagcatgcatgcaagtaatcataaaatacatctatgtaaacaagcacactgcatgcatacaaaaagatggccaaccaaccagaaggaagcgcatgtttctgccttagtttattcagcacatcagttgcgtcaaatccggcattgtcacataattgtctaggtataacctgcagtaataccataactttgcataaaaaaacaatcaagtatactgtgagtggaagaacatgattccatacccttcaggtctaatactctaatttcttacagtaccctaagtcttcatgcaagaccaaatacttagggatgcaatttcaaaacatctaatgtgaaaaagttatagccttctaaaagacgtcatttgataatcccatgctcacagacctccaacatccagtacagcaattaatgtctcaaatagtcaaatgcaatgagcacttctacttttacaatgttaaaataaaggaacatatcaatgtgtcaatttcaggttgaattgcgccatgtaaaatacatgcacaaaggatttttctcccaacccttccccaatagtaatacagtgaggaggcatatgattgaacagttcctcatcattggataaaatgtctgagaagtgatagccgcccttaagattttccaggattgctatgcattgttaaatatggatcgactaccagacacattattaatggcattaacgttggatttggaagaaacaacattaacgaaacacattgctaatagctaggaatcctattagtttaaacttaagaccattaagctgagaagttcttgatggagatcgtcgttactcgttagtgccaaaacaaaaccacttgtgtgtcaaacaggcattgcctcgagttactaacaaagttgaatgaataaaatactagaataacataaaaaggattgtgccaaattccaaaacagttacctcaagagcttttgcataggagttaatgaaaagctgagactttccagctattgtacgtgcatgctgcctcaggtaccggcttatctccatctaccaacaagaaccacattaacttccaacaagttgactaatataaatcagtgataactacctacaaattttagacacatacatctattgcacctcccccagcaaccactgttgaattcttcaaagccctcctaacaatcatgattgcatcatgcaaacttcgctctgcttcctctatgaactgtaagaaaatagtaaatatcaaatataagtccaagattaccagagctattacatgagttcaactacaagtttcataaacagttattgcacagcacataacagacctgatcagctccaccacgaagaactatggtggctgtttggccagatggacatccattgaaaatattgaacctctcatttccaacctgcctttcctcaaaaatttcacaagttccaaggaccttcaagcaaataaatcacaaaaagttcatctgtaatacataaaattacagaaaatgagcaaatcacgacagagttacacaagtaatgtgaaacctcatcaataatgttattcacagatgtttgtacggttccaccagaagcagcagcaaccctttttagatcttcttcagctacacgaccagcacagaaaatatctcgatctgcaaaatactgtttcaagggaaaattattttttttaaaaaaaactaattatagttgatatccctgaaagtttttaacatagtaaaaggagtaattttcaaccattatcatgaacaattaataagggtgtcaatctacacttaaacgtgtaaaacacaaacaggttgatgccgaatagaaaatgcaaaaatgaataaaagctcattattacataagagacaatgcataaaatgtaccaggaaaccatcctaggaggaggtggcacacagcacactttgcacttacttaaaagaaacgttggatattttataggtagttgaaagaaatccaagagtatgaaaaaaaatagatttaattaaaaaaaaatgattaaaacctgtgtagctagatcaccaatagccaatcgtgaaagaacaactttggcaccactgctgacacatttatccaacttgtcataaataatattccattctgcatcaactattgactgatattgcgcaggatctgataacctgtacagaacaagaaaaaaagaatgaattccaatttggtatgcaatccttcactaagatcccaggtcagcatcatcaaacaaaaaaaaaaaaaactaaaacaaaaataccttatttctgcattttctttctcagattttagctccaactcaacatttagtaatagtatttttggattgagaaacttcttgggctgttgctcaaacccagcatatgaaaatgtctttttgaaggcaacaccatttactagaaatgagtcccgcatggtaccaccaggaacctgtagaagaaaacctgagtctccacgattgattttcaaaagaattctaaacactaacacaaaattgattaacatgtaattaaacattaaccataaaaacaaaatcctgcatgacagtaacactccttgatcttcattcgtaaccattttggttagttgattgtttttactttctatcacatcatttgggcaatcaaatactaatgcacacatttaaaattccaaaaaaaacattattatagaacatggaaaacaaatataacacatctactttaccatatctgaagagaagtggaagcccaaaaaatctaattacaatactataaaaactaggcaggctttatttggggggagggaggcactaaatataaatgatgatgctttttactcattctcaaataattgtcactttagagtatagcacaagaattaaggaaactaataattatcccaaaatctagtgattattgaactaaattacccatttctcatgacaatgtattattaataattcatctattaaaaaaatcaacttaattttacaattatgaagaaaatatttaatgagcactattgttaatgtggaggacaatcaaacaatcaccaatgtaaaagagagaatgcaacacacaaatacaagattgcaaaagaaccaacacatgtaccttctttattccaatcatgttcaacctgtcttcattttcaattgaaattacagcatccacaaccatgggtgcaaagaattctttctctccacctataagcttcgaagaaagtgtggtagaagcacactttgcaagcaagcttttcttttcttccagactttttccctctatgctaacagctaaatctttaatcttctcaatagcctgcaccaatgataaaacaagacaaaagtaatgtgacaaatcaggaacatattccacttacagtattcaacagtaatttaagacaaaaataaaagaaaaattaaggccaggccctgcttaggtaaacttttccataagcacttataagagaaaataaaaaaggtaaaatgaatcgaacttctcccataagctaaaataaacttctgcacatcaacatctggagaagttagataagagaactttagcaaaagttaagtgcataagttaattttaacttaagagagaaactcaattcatttcagcttgttaacttattctcctataaatggttatatagaagtttattcaaacaaggcataaataaataaaattggagatagctctgtaccaaggagcaggccgtcctatagctccgtatcaagttttgagagtgaacaccatcttcaatgaatggcttggcctcccttaaaaactcagctgcaagcaacaccacagtggtggttccatcgccaacctttttcacattcacaacaatacaagagttcatttactaacaaaaaattccaattccaaagtttaaagcatctgaatgaaccgaaaatgaaaagatcttgagagaagtggcattgcaagagatcgaagggaagttaaagttacctcggagtcctgagacttggcgatgtcgacgaggatttttgcggcggggtggacgatgtcgaggagcttcatgatggtggcgccgtcgttggagatggtgacggttcccttgtcgtcgtggatgagcttgtccatgccgcgagggccgagggtggtgcggacgacgtcggccacggcggtgcaggcattaatgttgctcaccagctgtggcttcccttgcgaagtgtccgtgccttccttcagcagaatgatctgaggttgctgtttgatcccacaccatttccaatagcaacgagttaggttaggttaggttaggttatggaaacacgtaacagagcataaagagaatgaacttaccagcatcgctgacatggttgaagacgcagaagaaagagagagagagtagaactagggtttaagttttgaacttcgagaagcagcagttttctggctcctactctcgcagtgaacgtgagatttctagagctggtctctatttcgaaccgatatttcatttttatctacatttgggccttcagcccattctctatcccaccaaaaattttacaaccatgaccatttggtgtataaaggatttttacgtgctaaatcgtgtaaagaaatacattgctatttaatcagaaattgttatatacaattagtttaagtttgttgatttttcttaataattatataaaaaaatatattatctctgataatatgtttaattaaaagagtaatattgtgttgtgataaaaaaaaaaaaagtaatgatatatttgggcccatttacaaaggactgaaatacgttcaaagcaagtctcttcatcatctttaaaactcaacgtatgtatcgagactagacaatatatatatatatatatatatatatatatatatatataccacatgtattttttatagaaaataattcaatttgaatcaggataaaattactttaaataacaaaatttttcttatatccaatccttaaaaataaaatctcttacaaccatttttcaaacataaaataaataatttatgcacaaactcaataaagaattttaacattcaaaattagttaatataataatttaaaaatactagatagtattaattaatgcgtcttgctgacgaatgttcttacctttaggacactagttaaagaaattaaaaaatgaaagtttttattggaaatcatataaaaacgcatttaaaaactgtaggaaaacattttacatatttcaataaaatattttcctcttttatatgtctgacatgacacaaattataagaaaaaatgccttgtaaatagaaaaattaatagaaatacttcacacaaataatatattttttctgttcagttatcattaattgaaaatgtcaaaagacacctacaaactcaagatactgtgaaaggagcattgtgttacaacaatgcacaacaataaaacaggcacgcacgctcggccattagctacacatataaaaacattgctagagtcttagacatttctacatatttttctttgtagtcccttccagattacacttgtcaaccagtaatgaactaaagcaacacacagcaaatctaagtagaacaatgttatgtaaggacctcgtagaaaagcaacaaagctgactaaggtagtgttgcctaagtagtaaaaacctttggtggtttggcttcaattgccaaaaaaaagactcacaaagaagagagaggcataggaaaaatcacaaaaaaaaaaatgtttaatgtcacaaatgcatcatatatctatctttttatcgaacggtcttctattgtgtcgaagggttgtctgtttggtttttcctaccgaggtctcaagtgcttacgtgtctgaaaaaaagaggaaagagtacatgcaaaaaacactttgatgctcaagtgaaggtttgatctagagctattaaggatatgtagtgagtagatgagaatgaatcagtcttcttacctgaggggttcacgcctttttatactaatcttgtaagacctaagatgtgtgtttgtcacatcatgattaccaattaagtaatattccttcttatcatgcttagacacttccaatcaagttatcatccttaaatgggtttagtggaaataatcacagtcaagtggtacttattgcttgtacatgttgaaggtcgatacagtaaatacatactgttcgacataatggatacacgtagtcaaggggtgtgtttgatttggatgggccaggtgttccctcggcttggtcgggcactttatccggtataaaaaaatatagaaaaagggatgaagatggtagctaaaaatggaggaaggaaagtgggtgaaggcaatggtaaaaagaagtaaggttgtggttgtgaggtagaaaagggaaggtggaagaagaagaaaaaaaactctcactatggagagaaaggaatccatctaaaatgggaagaaaattctcccattgaggggatggccccccaagggggagcactctgccaggtcccgtttcttccatcaccatgtttatgaggttaactttatagttcacacaatacttaacatgttgggcttgaagtaatgagtcaatctaatatgttaaatgtcgcgtgaagtcaattttatcgtcctgttattttttctccttaatttatgaaaataaagattactatagcatttttttataaacgatagatcaaaataagttaattaatttatgaaaataaagattactgtagcatcttttataaacgatagatcaaaacaagttaatttaatttcaagtgactaaaagtaaacagtatcctatttacatgaattgaaaacatatacaatcatttaaagtgtaaaactcattgaaacaaaactctttttcatatatacagttaggaaccgaatagcatgacaaaaaaaaaacataattatctactaactattttaaaattttagaagttcatcctataacatagataagcgaacatcaaatgattgagtgatgatccttatgcttgaataccaaagaagcattgccaatgaaatacctcaaaacaccaatgctaaacatctatcttagtttgaacagaaaatgaaaatggcaaaaatctctggtctctatagtgcaaataaactaaatactacctcgagtgctttttaaaaatctcttgtaaaattatctaaatcctttttataagaccttccccaatttatctattgcgttaattaatattcttgcaaaattaccattaaacagaaatacattcattaattagataaagacttaaaacaaagggatctcaataattttagagacactactggaaaaaaaatcgttgacaagtttagtactactactaattaaattagctacattcttttaattcttataaagtgattgaaagaaaatcatatatataggacaagagttagtaaatcatgaaaaagataaggtgaagtttaattgacggggactagcggacaagaagagaacattcattaacccattcggctacaatgatagatatgataagcatattatataggggaaacgaatcagaatataacacgtcaaatgtcttggttgaggagaaaaaagagtgttaacacccactcaatggctcggcagaacaagcaatgaaaagtatacaggaaagaaggaaggatccagaaggggacagggaacatgtagagtataactctactttcctctctccaaataatagaagatctaaatagacagcaatgcagagccaaacgtggatgccaacaatctataatctaatgtttctccattttccttcccaaattccgcttactctcatttttttttattctagagtccacaattaacaactgcaaccacgtccttgacctcaagatgatgatattttggttacatctttgcttgatctgttgtatttcatgtggctgttcactagctgccctgctgcaatggcagacatcagagacagctctcctgctaaaacagatccagcaacaatggtggccaagagtcttgagtttgatcctggtgactccttgcttgcacccttcacaccaagcaaattcaagcaagcagattgggatgcaagttgagtcccaccaccaacagtacccacctgtgagcacaataatgaatcatataaaccttggctattgaattggaaaattaaccaactttatagaagagtattgtctaagaaaatatatggggtgtgtcaaatcacctcaatggaaggcatggtcactgagatgtgaaggtccctcccgtcattgacggcttccatcatggttatgcaatgggaactctcaacattttgagctggatcttggccagtggctataaagatggcagaaacaatgttactagcatgggcattaaatccaccaagagcaccggcgacagcagaaccagcaaggtttttgagcatgttaagctctaccagggcagacacgttggtcttcaataccttctgcaccacttcttccttgataattgcttcacaaacaactgatttcccacgtccctcgatccaatttactgcagcaggtttcttgtccgaacaataatttcctaaaggatcaagtcagtacataaccatcacatttccagtctaatattcccattaaaacaatttcagcctaatattcccattaaaacaatttcagcatgtcttgattataggcatcatatcaaataaaccaacgcattcaagagagtaagagatgcaagcaagttaaataaattggtgatgaatgcaagagtttggcatagtcaaatttttttgcatcatgttcatagttcatacttcatagatcataattaagcaaacaaatcaatctccgaaaataattcaacttgataataccacatgtataatgaacgtctacaataacagcattaaatgacacaagttgttcaaatcagataatacctataagcccctataagcctataacaatataatacaacacaataataataaaaataggctaacacgtatgatacggaaagcttacactagtacaatacaacattgataaaaaaggataaaacataaaaataaatacggaaagaattaaagataatataattggaccactttcatgaaagaaacaattacgtcaatgaaaggagacaaagagccgatatctatagtattagtagcatataacaaagtaaacggcattggtgaatggtgacatcattcaggttaacagaagaaagatccagtcctaataaattaaaaaaggaaagaaagaaagatctagtaaatctcatccatcaaaatgggaaagggaaagaaattaccagaaatgccaataacatccatgtcggggaaatcattctgaagaaaatcaagaacgttttgcacccctttggaaaccatgttcatccccatggcatcacccgtgctacaagtgaatctcaaaaaagcattcttcccagccatagcacactgaataccttgaagcctggcaaatctactcgacctgaaacaccattaaaccaagcaacaaaactcagcgcataaataaataaataaataaaaatctcccataaacaacatctaaattccagtcctctatacaccatatttccttcactcatcctcttcacaattataacaatcaaatcaaaattttaaaggaaaaccatacctttgattctcccctagcatttaaaaaaaaaacattaatgttaatccctaaactgcagaaaattaacttagtccgtgtttgatgaagctaattaagaaaaaagaaaattaatttcggtcaaaaattgattttaaagtgaagtgatttatgtttgattgtttttatattaaaaccaaattagtagtaaaatccattataaaaccgcttcaactcaaaattgagtttggacccagaatcaatcaattcttcaacatgcaaccaaaaacatgattttacctaaaaatataaagttagccggtaccacaacatgattttatctaatataacaagaattcaaacatgattttaatcgatactgactcctgaatgattaatagtgtgtttggattatagcttcatgtcgagaaataaaaaaataaaaaataaaaattcatggtgaaggtaaagcaacaaatagttccttccattcttcacggtatcagcatgattttgtgagttagaaatgatttttgagacacaaaagaggttggaaaagcaaacctgttgaaaacaagtgacaaggtatcaaaattgagaggatcctccaagaaaaacttcaactgtgcagctctcttggcagtggagaatctaacaacaggtgccctcgacatgcaatccctcaaaaccacactgctggccccaccagaagcatagatggccttgcaccctctgttggtactcgccacaaggcacccttccgtggtggccatcggcacagtgtattcgaatccatccaacaacaacggccccgccacccctaccggaatctgcacataccctaccggcatttcgcagcactgccctaaaatggagtcgtagtcgaacccctccagcggcaggccctcaagcgactgccccgtcaggcgctgcagcgccgcgcgtcgaatcgccgcggcgcggcgacagtcgccgaggcgggactcgagcgcgtaggagggcgtgacgcccttcacgacggagtttacaatctcctcgtcatcctcggaggataatataattgaggcatcccgtgagggcaatttggtaattgcgggcgagggagagggagagggagaatctgtaacggcgtcgtcgaggtcccaggcgtcgttggaggcgcgtgagatgaaggactggacgaagtcgatgccgaagaagccgaggaggtagatgaaggaggcgatgagggagaaaatggcggcgatctcggagagagtgacgacgtggagaggggtgtggctgcggatcttgtcgcgccagcggtggaggaggaagtacgcaacggagaagaacagcgtgaagaagatcgcgttggtgaggtacagagggagagggagggcgtcggaggccttgggagaggaagtgtcactcctcttcttggggtggtggtggattgctccgtcgtcagcggcggccggcggccggcgatggaggtccattgtgggagggagagagtgaaagggaagaaggaagaaaaaggagatatgaatgaataatatgatggtggtgtgtgtgcacgtgtggtggcaatgtcgcatgcgtgtgtttgccagccaaaaattgctgaggctgctacgctgttaccagacccaacaccgtcgtttatttgctgtttttctttgtttttattcactaattttcaaacctttttttgtcctttttcgggaaccacacaaacactcaataaatacttgaattcacattttaaataactataacacccactatcaaatacatacttcaattagtgtgtgagaatatttcaatttataagtgtgtttgagttttaatcttaaatatgtgattacattaaatatttaaaagatagattttatcacttataatactcatatccaactcagatagaattatctattattaaagatacttgtaatcaaaatagaaattaattaaaacaccaattatgcatgtactttgacatgataattaaatttaaactaaaaacatttttacaaacaccaataatgcatgtacttagacatgataaataaataagttcataaatagaatttgacaccagttatgtatgtactatgtacttaggcatcataataaataagagataaacatgatttgtcgcaaaaataaccaaagcaccgattatgcatgtacttaggcataataattattttcaaagttgtaaatacattttgacactaattatgcatgtatatagggatgataattaaatttaaactcataaatataatttgaaaccatttatgcatgtacttagacatgataattaaatttgtcagactctttttttaaaaaaaaaaaaaaagaaactagcgaggctcatttgatctatacattactctaaccaatcagaatcttcagttcatatgtcttaaaattatagcacatagtcggaattcgatgtctatacaataacatacaataaaaatcactctaatctcgactttggtaagaaaaaatgatttaaaagattaattttctcgtatttacaaattaacaaaaggagcatgaggaagtatctccccagacttgtctattggaaactatcatcgatctctatatttctaattttttaaaatataatttatttttaaatttcaattaaattgataatattttttagtcattgttaccggcttcactaatgatgatatttttcatattttattcataaaaatatacaaataataaaatatggtattaatttattttatattgttttgttttaattctctccattctaaacatatgaacatactcttacattctgtttggtgaaaaagaaacagtagtaagacagaaaagaaaaaaatataaagaaataggaaacaaatgtgcttagtaggggaaaaaatgagaagggagagaaataaaagttgtgatattattaattgtttttactctacttttaacttgttttatttgtatatttatctcttttatatttctttttttaaaaccatacataaaaataaaacatttttactaaaaagatttaactcaaataattaataaatttgtcatttcctgtcttcaatgcccacttacaaataataataaaaaaactatttactttttttatacatatttttattcactccattttttactctcttttttaagagagaaaaaaatggacccttaataatggttggggaagctttggaattgggactaactcgaacattcgggacaatgcctttgtttttctctcagccttttctaaaattcattttaaggcccacatacaacaaaagaaacaacaatgacagctggggcttttcaaaagcttagcatgttacattatccttcatgaaaaatttaatatttttgttgttgttacaatgaaaagtttaatttaactactccaaattctgtaatatttttttacaaattaaatagtttggacttttattttttattaactagtctttggattctcgttgttattgttattattattataataataaattattctgttccatgttatcaggaatttaaaatttgattaaaacaaagtatgaaaattcaagacataaatgttaatgttgtaggaaaaaattcgtggattattatgttatttaagaattaaatatttaaaatatattctttgaaaaaatcactgttatcttaaaatttcttattttttttaaaatttcatatattaagaaaatagtttttattatgatattatatttatgatttcgtcaaggactttatattcgattagaatttatcgaaaaatagtatttatatcccaaagattattaaaatcgtatatcaattctaattaaacccaactgttgtataatcgagttaaaatctaaaataaatcttcattgaatagaaaatcctagataaattataattaatataatatcatgatcaaatattaaattttaaaatatgaaaatctaataattaaatagtaaacataacataatatttttttaagaacatgtttcataattttttttaaaaagtttaatgggcgtccttttcgtttgttgtaattagtctttcatgctttctgtcttttatttctgaagcatcatctttttaaaaaaggtttaattcttttatcctctaatttattttttaattcaatttgatcctcttattatttaaagattcaactagatcttttattattttttaaaataagttcaattagatcttctttttttaattataaattcaaactcttattaaaagcacacactcatatttaatatctaatcacatctttatagaaattctcatctcaaatatttctgaaaaaaacgagataatatataaaaagtaataaaaactactttcaaattttgaaggtaaggcctttcttcatttaaagagtttgagcatctccttaaattgtcttggaacaaatattgttaaactatttttatgaaattaataggtttggttcaacccgtcactttcttctaacattttcaaaatgacaaattgatgatatgcctttatatgaatgcaacaaatcaaaattaataatttgatttcaagcaatttcaatgttagaataaattgttctaagtacatatggaaggtttatgggttatttgacttatcctataagaaaataactactagataagttttaaattttttttcttagatgcccatcattccacttcatttctattcctcttgttaattctatagattgtaaattatagcaacaacattgtaacactttaagttttgtggaggaaaaaaagtattattcaaagaatttttttttgataacattactgataatgaatttataaaacctcttaaggaatcaatttgttacttcttaaagaataatgtaaaattaacaaataatgattaatacaagtggtaatgagttatatccttttatcaagtgctctaatgtttaaattttattggtacttatatatcaaataaattatgtaagaaataaatattcaccttgtttatgttttatgacgaagatttatcacgactttcggtgagggacaactccataccaataccatgattagcaaaaaatagatcaaataattgttgtattacaaattaattttaaatgatttaaaatgtatgaagatattttttgattttccatacagtgttgagaaatcaaactaactggatagtgaaaaatttaaagaaaattctcttaaccttggacatttgttaaaacatgataaccactcatttattgatggattaggtttacttgaaaaactaaaagttgtaaaataaattatataaaaagatttgattcttttttaaatgcatatattacttatagaataatgttaatgtttcttgtagtcaattcttcaataagttttttcaaaactaaaattaatacaatcttataatttaggatccacaatgtcttaacaaatattaaaagaatagactttattattgattaaaaaatgtttagacaaaattgattacactaatttaataaataattttacatctcaatttttttaaaatatatatacattttaaaggaaaatacaaccattttaataacatatattattattattattattttttgtcaaaattagttttaaaaaggcatcaaacctcaaaattcattttaagcctataatgtaattatgtttaacataagaaacactagaagaccaaaattttctatagtcagttttttttttttttttaagaaaaaaaacaaatgaaatatataggatgaagattaaaggaatcccaattatgttcacacctcttgaactcccatccaaatacaagactatagttagatttatcaaatatagttcaccctagtttattctattttatcagcaacttatcattcactctcaagatctcaagattaactgagattttttaaaccatcgtaattagggtatttgatccttatcctctaacgacactttgagatatttttgcaagttttaatcctttaagatgatgataaaactaatcttcaatcaaatacttaatcaatcttaaagttctttatttctcttcaaagacatgttatgtgataattaatcttaagttctcacttatagtttagctgtcaattgcacaacactcattgattggtttagttgatttagacgtttgtatttagtatatgctcccaactcacttatttatttaatcttaatttatgtttgcttatcctttaataagcatgaagaaataaatcataaaacattcttcatccacattcctagataacaagtatggtgattatcttggaacttgggtaaaatactaattattaaataaaatgtagacttgtagcaaagggtaaaagaaattacctaacataatctatcagttggagctctgtcctaattaacagctttattaggaacacaaaaacatcaacctgttaagatggtaaatctaaagaatacaaagcaacacagaattagactgcttcaaaattatctgaagtctgacttgtatcctgtaaaaagtgtccacacatgaaacatattgtcaattaaaccatttaactgaatacaaaaaataaatgataaataactctttaattaagagctgagttgaacaaaaatcacaaaaggaggcatacagtagaggcaagaaaatatgatcacatgtacacatacaaaaaacacagtaaatgcaacagaccaaatttccccatgtagacataccattctttttactttttagcactaaagtattggtatagatagttggaactaaccaattaggttgaccatgaaacctaaaaattgatcattgattcaatttgagtagttatacattatgaattttaacagagaaccaaagagtaacgacaataaatgattaagttgagttgattcttatgtaaaattaactccaaatatacagtaataaggaaaagaccaaattgtttctagtatcaataaaatcggaaatgctccttgtttcaaagaggaggagaaggattattctcaatttctcatttcatttttttattaataagaaccctaatcactcgatttgaaatttagtcacacttaaagttttttacttctcttcaagaatgtatcatgcgagaatctaactcatgtttttttcatacaagctcagtgtgtgttgtcaattgaactacattcattgaattttattctcatttcatttgagacataggtgatggagtctgtctatgaaaccaacataaaccaagatcaaggcttcaattgatcttaatttttaatgaatgtgatatcatggttctcttgttgcaattccgaccttaaatttttcaccattttcctcatcatgaacattagacactttagctgattgtaatcaaataataccatttttgaatctagattcaaaatcataagattcctttgagcagagcccaaacagaagcagcaatattaaagaaaaaaaactcagataaaagacagttcaacaatgcactctaaaagtcacaaaacgttagaaactaaatacagaacaaatgcagaatttacatagcaacttatgaccaattcagctgctatacgtgcaaaaacccacagacaaaaaaaagggaacaaaattgaggacaaatcaaagtacttacactttcttcttgctgagcttgtacatcattcttgatatttctccctctcttctttcttctagaacttttatttattttcttatttgaaaacattacgtggagcgatgcattcaagtctaatagaacctttccacataaagtgcagacgctgtaaacaaaacacattgaaatttgaatatcactaggatcaatcaatggcatgaaagtccacaattttactaacaaagaatccccattattttcccccattatctcaacttttttttttttaatattttaacaagccaatttcgattgtttacattagtcttatactaacatatttggttctttaccattcttattctttttcctggttagtgaccacaaatgtctctcaattcactaaattatacactaattccgctggcagaacgtaactgttattgacctaagaaaatttacacaatcagaattgaacatagattatcatacaaaatagactgtttccccaaaagcagcgagatcttacacgcagactcttcgggttctacaattctgatatgatttttcacgttccaaatgtgattttaaatatttcgattgtttatgacaagccaaattggattgtttatatttgtagcataaaaatagagaagaaaagataatagtagtaatagttgttaacctgcaagaattgacggaaatgtcaccatagatggtttccaatctggtggggcaaagcctgcaacaatgactacaccactccatctccattccaatggtaacaattgcgttcagtttcaaagtcacataaataagcaaaacagtgtgtcctgaatccttgggaagccagtaaatagctttgattaagcatatacactacacctttataaaaatatatatcattgcatatgttttttttttttattattttgtttttttttattattaagacgtaatctcttcataaattatttattaaaaatgtcattttacattaacattttatttctttaatttgaaatgtaagtcattttcatcatctaggtttttttttttgagttaattatatctctaattttttttttaaatcaagcaaatttgatctctctttcaaatttcgtatacataaattgtttatagggcttgtttatttctattttcatttcctgtttttttattttctgttttgacttttaattatatcattgtaacctaatttttaatctatttcctgttttaaaaaaattgttcaggaatagagaaaagttttttttttcttgtaaaaatatttgaaagcaaaaaaaaaaaaaagactgaaaataagatgatgattttgtaagtaaaaggtgaaaacaaaaacgttttttttaaggtaaaagtgctcttaatttatcttagttttttatattaaaacttcactaaacctcctgcttctaaactttttaaaacgacttcatatcccattaatcccaagtatttggacataaaatgaaaattaaaatttcaaatataagaaattcaacaaagcgatagaatttgcataattttaaacatagagagattaaattaattaaaaaaattaagataaattgtgtctaatctaaacctctcatctcagttgatgcatttgttaatgtacataattgatatatttctttaacaaatttacgtttacccttttttcaaatacagagtattgcatcgatgataacaggtttatccacaacaagcataaagaacaaatcatacggtaaatttttcaaccacaaaccatatttgttaagaaaaacaaaaatggtggttatcaattgcaactttgttctatcagctttcgttacgatgctaaaactacctctacagaaaaataacctgatctagaataaaaagggaaataacgcagtaaaataaagacgggatattttcattgattggttttctaaagaaataatacatttatatatagtcctaagatactaattattcatgtgtcaacatcatgttattttacaaataaattaaataaaaactacaataaatataaaagttcatccaatatagtcttttttccacttaggtttgagagcatttatgaacctttttggacccatcctaacaactttcttaataaaagtcacctatatcaaaataatgtcaaccaaagggattggtttaatatggcactaagcagaactaccttcaagggtgagaacatttggacatatatcctaaaaaaataaaataatataatttggtttccaatttttttaaaagatttaatttcatcttcaaattcttttaaataaatcaatttaatccctaattttttaaaagattcaatttgatttcaaattttaaaaaatgaatcaattcattccttaaattattttaaatcgtttaacttggtcctcaaattctaaaaaaaaaatagaaattagattaaattatttaaaataatttaaaaacaaaattgataattaaacctttaatctacagcacactaagcaacactgattcttcaacaattttcagaatcagaaacttaagctgtgtaagaattaattggttgctttgcttccttgatcagaggacccttagaagctgcatcctgcaataaggatgcatccacacaacatattgtcaattaaatgatctaactgaacaaaagaataagattgcttaaatacaaaaaaagaagaagaataagttagagtttaagagcccaatatcacaaaaaaggaagcattcagacacaggcaacccagataagaaagtatgacgagacaaaaatttccctgtatggtggaatcatggcatgggcgtttacatttaagtatttatcttttttttttttttacaatgataggttcaaacttatgatcctatgcatattaccttaaatctctgtcactagattgaccctagtggttatgcattcaagtatttatctaatagaatgtaggatcctttgtgatggagatcacaatttaggagatgaataggggcataaacaaattaagatcaaggatcatggttctcttattacaatttgaaccttccacagcttcattaatcatgaaaattagacatacttttcaactgattgaaaccagatactacaatacaccagaaaaatcaatcccagaaaagatagttttaaaggtgcactttaaagtctaaatcttcaaaaacatatgaacagagaaaagcataattaagatttacatagcaagttattttcaaaatattaattaacaaaaaaaaaaagaaccaagactaagagtacttacacgttcttttttcacaatttttacattgctctttctccttttctttattcttctaggatttctacccaagtctaataaaatcttcccacacatggtgcaagagctgcaaaatacaagacattaaaaatcattaatggcgtgaaaatataataatagttccccccaaaaaccttaagaggaaagaaaataggaacaacactagtaatatatatacttcacctgcaatatttgcctgaagattcatcgatgatgttttccactcttgtttgacaaaacctgcaacaatgatcgcaccactccatctctatgaaaacttttgtgatcaatttaaaattgctatagacgctgtcttatttcttgggaaccaagtattgcactttgacgaggtatctataccacacctttatatattttgcagaggaacccaatttttgtagatcatccttttcaattttttattaatgttagatttatgttttatttatttgattatgcttatctttcccgtaattttaatcatgatatattttataaagatttaatctctcaatatattacatttttttatccgctcaatatattatcttttaattttttttgtcaataaattatggttccttttttgcaatattcaatactttattttttttgtatttatgtttttaaaattgtatgtgaataaatttggatactttttttcggtgtactggatacttttatttatttatttattattattattattatttaagattaaatgaatgactggctcaaaaaaaaaaaaaagattacatgaatgatatgcataaataattaaaaaaatatttttttagaacttgtataattttcttgtaacatactttgtgtcattgcggaggatatcctatcctatctaatctaattccttcttcatgtattttgttaataatatttcacccttccattttttttatatatttttataataatttaattttttaattcaattttttcaatatagttaaatttgtttggttaggaaaactcgtactattaattgccaagtatgttaggttctaaatattactttatatatcacatgatgaccagagacggattcaaaaatttattaaaagagttaaaaaaattctttataattatttaaatgtctaatttttaataagtaataatatttaaaaaattattattttttcacataaaattaaaactatttttttatttaaatgataataattttaaccattatcataaaaataacaaacacaattaatttttcaaaattttattataattgtcaccttaatcattataatagtgatttcttttgaaactttttaataaatgtataaattttttatattattttaatacagacaggaatacaggatcatgcaagtaaattagttatttattgacaaccattgatacaggaatacaggatcatgcaagaaaaaaattgatgacgtgaagagttacattgacataaaataagttggatatacatatactcaacctctaaaaatgaaaaaaaaatatttaaaaaaatttaatttattttataaaaatttaaaagtaattccttattttttcttatttacctggtgcatctttccgtttcgttgaatcctgatccgtaaacaaactaggctccataaaacttatcagattttgacaaacatagtgcatgagaccaataatcccttgacaacagcaccctataattctgcttgtgttaatatccctccaagagcaatgaacccataccagtgaccaatgtacactgtttcccgtgctgctcaaacgcccaccagctgtttgacctaagtccatgccaccagttacctcaagaaaccacatctaccagttgtgggaatattaagttgtactttacttgatttacagttagtgggggaccacatcagggccttgttttgttgatttgaacccttgcaagaatgctcataagaaatttacattgtcacaaagtccattctctgagcctaaggtgctttacttctgcaactcctaatgtacttaagcctggggatgtcttgagaaaagcaagggtttatactgaggaagatgttctccaatactccaaggtgagttgtgattctaatcctttgcatactgattctgctgctgccaaagatgttggatttgaaggtccactggtacatgggatgcttgtggcttctctctttcctcatatcatctcatcacattttgtaagtttcatacttaccctctctttaaattttgatatgcctcctaaaatgagatagttaacgttctcatctcaatattaaattaatgtgaataaacagataaattagtagagttctattattagttttctagactgaattttatactctgtactctgtagcatacatttttacatgtaaaagttaatttgtttgtgctttttgtaagtgtgaaatttctgccacagtcagcagctttggggaactctaagttgattccgggtccaaatccccttgcccccatgaacatcctttctgtaaacttgagtattagacaccataatggaaaattatgacatgagatagagtatcataaaatgaagacggataagatgtgaaattgtaatctgcactataaggagtgtgaaataaggtcaagtgacccctcacttattgcatagattaaaatgtgtcatgattaatcagaagtaggaagggagacacatgtaaaaagcttaaattttatagtatttctgaaggacatgaaaatataaacatggataaaggacttatcgtgtgtctggattggcgttatgtcagtgtgatccgcgtccttttgaagtaaatttttttagcttccacggcatacttgacgtgaatttggttttggatgtggttggaaagtgcaaatcaccaacatgctattaagtggtcaatttaaatgctaacatgggttctagttctactgcttgaaaaattggtacttgtcattggatttggtcaacttgaataaaagacttgataaatgatgtgaattgaggcaatgctatgaagtcattcattgaaatattctcattctgtgataactttcttaaattcctcttcttccctggccacttcaatctttaataattgcagcctggagctgtgtatgtatctcaaaacttgaattttaagttcccagtctatattggagatcagattattggtgaagtgcaagcaactaatctgagagaaaataaaaatcgatatctgtaagtttagtcctgctgttattattgtgcattcttttttaaacaagtagtaattttgtttctaaatgaatgtttctcaatgctattcagtgcaaagtttaagacaaggtgtttcaagaatgatgaccttcttgtgattgatggtgaggctgtggctttgttaccaaccttgaatgtagaacagattcaacacgagccgtaaaagatattcactgttcttgactgttaatcacaaataccttttcaaaggcaatgttggtcataaaagtaatatgtttgttgttttctttctaatggaagtcattggggttctaaattctgatcccctaccctgaacacggacaaacagcagacaccaaaaaagtttttgttctctttgctattctgatgttggtgctgaacagttatgcttgattttttgtgtgcttgttgatcataccacgcaaaagttcacttcattgcactgagcttcaaatcaaacggcacaaagagatcttattgatatttttttttttttgtcttttgtgccatctaatactattggttttggaggaaatgtttaatgtcgtaacaagttagattttactttgtttcgtgcccatacggtttctctatattttgtattggcaactgcatcgcatgaaaccaaaaaatatggtcccttattaatcctgttgttcctccctatatagggttcatttaaatccaacatttgcagtagctatttacacaaaactaatggaaaatttgctttgttggtaagttttaagtaatatatagcacatgatccaaaattgttgatttgttaaaaacgaaaaaaaaacattaaaattagttcatgataaacaatctctcttccctttttttattttatctttttctcaaataatattgtttggcattactattataatagtagtatgtgcgaataaattctttatttatttttgtgtacgatagcgggacaatgaaatttgaacttacaacttcatataaactatctaaaccacaccactaggccaaacaatttattagtaaatttaaaagataccttgaattccatagtttaacttaccatcacacaaagtaaaatcaatacaacaattacaactggtgctatagtacatatggcctaccatttctagtaactggtgttatcagaagagatatcccacatcaagacaaagattaacaccaaaggtatttggttgacttgaatgccatctgaagcacaacaactttctggtgaaggtgctggagtgggtgcagcaacaccttcagtaacaaaatatagcaaccttcatcccatgccaacaatagcctcctccacttaagaagtagtaggtcttgaattcagttagatgaaacacgtctcttccttcaccccttcatatgttatgaacaaatcctgtgtccatgcaattctcataactaagccttgttcacctctagtacattgtactcgttcctatcatatccaaagtcttgcaagcataacaacatctaagtcatagtcaaaagataaagtataataatctacattaataaattaatctacaattatatgtgccctttttaatgactttgactcctttttctcgcttctacattaataaatttagtaaataattaaaaaaatatttactaaatatattgttgtaattatgaattcaagaacttgccgcaaactaaaaaagcttagaaaaattgaaatataagttaaatttaaagcaaaactaaaatattttaaaattaatttccttcaaatatattatttacttatttcaataatgttattctatttaatgtaatgataatataaaaaataatatttttaattttataaaatatattatttaaaaacatgtaagacctcacaacaaactacataaccaaattggttagatttggttaatgacctattctaattaattgtatactagtgatcatttgttaattgataaaatttaaaaataatattttatattaaattacccaatttggttagataatcttgggtaggttagttaggaaatccattaattaaaatgtatcattttgatcttttatgtttttggaatgtatcattttgatcatttttaatttaaaaattaacgaaatacttacgcttcaaacgaaaaattgaaaaaagactaaaataatacattttaaaaatataaaagactaaaataaaacttttaaaatttaatatatataaaaagtaaaataattatgaaacataataaactaaagaggaaaacgtaaaaataacacgtgattgaaaataattatttttctgaaaactctttaaaaaacagcaatagaaatagaaaagtaattccaaagaggaaacaagtgggttggttgtcagcggtggtgaacttagacatgcagtgggtgcacaccacaagcgcaatatcagaggaaggaagcatgcactgcatgcatgtacctacccttttcaattcaattatgcatcattctattattctacgtctctctctctctctctctctctctctctctctctctatatatatatatatatatatatccacccttccaaacccactttgcaacatccatcaaagccttttctttcgttgctacttattcactttcattctttgcttcagaaaattaacagtgttgaagagatccgtcaggcacaacgtgcagaatgccctgccactgtcatcatggctattgcctattggcaccaccactcctcccaacttcattggatgcaaggcaagacatggtggtcaacccaagtccaagattacccatctcatcttttgcaccaccagcggtgtcgacatgatgtaccaccaaggctgctttgccggtggcacgatgcttcgtctggccaaagaccttgccgaaaacaacaagggtggtcgcgtgcttgtcgtttgttctgagatcactgcagtcacacccatcttgatggccttgggggtcaagccttgtttggagatggtgcaccatccttccatacagtgaaggggctattgatggccaccttcgccaagttggactcactttccatcccctcaaggatgttcctggactcatctctaagaatatcgaaaaggcactagtgtaagcctgaaaaaatggaagctactagacatttgctcagcgagtatggtaatatgtcaagtgcatgtgtgctattcatcttcgatcagatgaggaagaagtctttaaaatttattataaaaaatagaatttacttttccttttaagaatgaaatggattgtaatattattactaaaagttggtcacgacctgcacatcaaagtcaataaaagaaagtaattgatgagaaaattccaatatctaatccatgtacaaatatcaaaatccctaattacttgataagttcactactcttacgccttacaccagaccacaacctatgctaggattaaagaatcatactatggtgaaaatagtacagatagtacagcttccagcaagccttgtattccaatgtggtcatcacaattttcaaatccactaagttgaagagtcctgctgtttgatggattcacgtgcaatatttgttgattttcatgaacttgttgatatgcagaatcaaatccactcatttgatgagtcatgctatttggtggattcagcggcaacatttgttgtttttgttgcatttcgtgaacttgttgaattccagtaagaggaattgaattttgtggatcaatgatgcaaggaacgtcatttgtgtaatgtaattttatatcatgaatgctttttctttttttctgtatgggtgaggcattttggcgaatgaaatacttttgggcatgactggcaatttgagtaggggatcttgttttaaccaaccttgatatttctatccagtttcccttcccatgtttttggagcccaagtaaaaacaacctgccattaaaacacaaatataagatgaaaaattgagaaacttccattcatttgagttttatacaatatattaaaagcttacttatgttcttcttcagtccatggattccttctcccttgcttgcgccgaaccgatgaaccagcgttctgcatcatggaaccaccaccgttatgcaccagcgcctcaactgggtggctgggcaactcgaccggagcccacgcaatctggttcacgtgattgggcaatgtctggtggtgttgggtgtcctccgcaactagggttgcaacgttcagcggtgtctggtggtgttgggtgtcctccgcaaccagggtagcaactttcagcggtgtgcggtggtgttgggtgtcctccgcaacctggatagcaacgttcagcggtgtctggtggtgttgggtgtcctccgcaactagggttgcaacgttcagcggtgtctggtggtgttgggtgtcctccgcaaccagggtagcaacgttcagcggtgtgcggtggtgttgggtgtcctccgcaacctggatagcaacgttcaacggtgtctggtggtgttgggtgtcctccgcaactagggttgcaacgttcagcggtgtctggtggtgttgggtgtcctccgcaacctgggtagcaacgttcagcggtgtccggtggtgttgggtgtcctccgcaaccagggtagcaacgttcagcggtgtgtggtggtgttgggtgtcctccgcaactagggttgcaacgtgcagcggtgtgtggtggtgttgggtgtcctccgccataggaatctgggtagcaaagttcagcgtcgaccatatatcatcgcaatcaaaaagcagattgtagtcataaacatcatcattccaatcgttattatataactcagacattgttttcttcttttatcttttaatcttttatggctttcaaagtttgaagcttcaaactcaaattgcctttctttccgttcactgggcttcttatttaacaaagcatgacgcgccattctttaaaaatttggcgcccaagtgacattcattattcattaaaatttgaaatttatttttttttctttcaaagttacttatccaaataaatgagaaattatagtaacacatttttaaaaagttattttaaacacaatatttattattagttaaaatttattagaagtcacaaattttaatgatcctacttcttatttaaaaactttttctcaattttatagtttttaataaattttaactaatattacatatgtgttataaatagtatgttagggagtatattattaacatttctctaaataatatacataatatattattatataaattttatcatcatcttttcaaattatatgtttattaatttattaaagttgaaatttacataattatattaattaacttatttataagtaatttcataattttatttgttaatattatcactaaaaagtgagattttaaataattttttaagaagtataagacttaaactaaattttaaaataatttatataatataattaaactaaaattaactcttatattttaattaacagattagtcacaaatctttcaaaatcgagtcgaccaaagttgatttccttcctacccttacactattatttaaataaatgcactgcattcgtcaatattcacctatttttatttgaaaatctcaaagttgacaaaaaaaatagatttaaaccaattaaaatatttcaaatgattgaatataataagattttttagatatttcaaaatttatcaatccaaaaaaattagattgatttaattaagtaatttgattgatttttttaatttttaaacaaaatatattttagaatttatttaaaagataaatgaaatattaaaaagtcaccaatattactaaaaaatagagagggaaaagcatgatttggtattaggcatgacagcggaatccggctccgtggggatcgaatcgaactctctccgactttgacggggaaaaatcaagtcgaccgggtttggggtcggggtcggattttccctgttaattaaaaccggggggtatgggataactgatatccgccctgaacccgccccgtaataaataacattaaaaaaattatatttaagttgtttcttttttatttatgtaatttgaaagatgtgatacttaatcatatgatgtgctacttaatttttggacaatatatatttaaatgatatcgtattttgtgagaaattaaatatgcatgtccttattttatgcaataactatattttatgattttaattaaattaattaatttggttttgtaatttttaattatgatctcattctcatattttgaatgtgaatttattattattttttttgttatgtaactagcattttcggcccattttttcaataacaaaagttatattatttttctaatttttttaattttaattaattagcgagggcggatcgagacggggaaaatcgaccccatcaggaatgaggtatatatttttaatcccaatagggatcggagagcgattttagagtatagggcggggatggagaatgcaaaacccgtcctcgttgtcatgcctagtaaaaatgataaattagataataggatttttttctaaacaacaaaaagatgattttttaaattgaatgaaagagtaaaaccgaatgtcaaataaaataataaggataaaattaagagagaaaaattaaactataagctaatttattttttataaactacttcaaataatttatgaaaataagtcactaaaataaacttgtgtagcaaagtagtttataagataattaccaaatcaaagaaacttaagtattaattacaaaagaaaaaatactcaaaatagcctcaatattgtgtatcaatatttttagaacataaaaagtaatttattgaaacagaattcaataacatcaaactatcttaaaatgtatctaataatatattgttataattaagaattcaaatttgacctcaaattaaaatgttaagaaaattctgaaatataaaatttttaaaatatataaaaaaattatttaaatatatgattttctcatttcaatgatgttcttgtattttgtgcaatcagaatttagaaaataatatttttattttttcaaaataatgattttgttttaaaaagagcacacaataaattaagaaacaagaatacttgatatagaataataagaacatctccaatggaaagtgcttatatgggtttcttagagtcatttattcatttttatcttcaccgttcataaaatttggaaactgactggcatgttttcattggctgtgatgatgctaaacaggcttgacaaccaccaaaactatgttttcagcttttaaactcgattccattacttgaacattaaataattttttggttttgtcatgaatatctccatttcagtgactaattttacttgctataaacattaactaatttttttttatcaagaaacatcaaataattttttcttttctcttgtcttatttcttctttttcttagcatttttttttttaaaaactttttcatatttaatattgagttcatctactaccgatttcaattaacttagattaaatgtgatgttgatgatgatgaagaaacatcaaataatttaaattcatttcatctgacaccgcatataattgttttaccttgccttttatctttttcacagacaatcattccaaaaatactctcccaaaattaaacgagacaactagtcccattttagttgtaccaaaaacattttgctttataaaccataccaataacaatttggtaagacaataattgttacatataaattaaatgagcacgccaagttacaaagtaagaagattcccactcttattgttcaaatttggcaaagatataagtacaacccttttcccccttttaacccccaccaaaaataaaaacaagaacctctttttcttatgctgtaatgtcacaacttctagtctatcatcttatgtacgacatttggagaaaagaaaatctgtctctcaatgtttgcaagatccaccaaagaaaggatgcagtggtatataccatatagaatgatccatcaaagaaacctgaaaagacttggctattagcaatcctcttgatgaggcataatcaactcaaccaaatatagagaagaaacaaacaatcttctttcaaaaagtaggccgctactccacaacaactcattgttatgttgttaagagttctcatcaaaattggggatgccatcaaaactctgccatatgtatttaccatttggacatatcactcaacttaattgacatcctcttttaccatactcttttctttggcacggaaatcctccaatctaggatactcttctcgaagcaacctgtccagttcagggtgttgattcaacggttctttctggccacggaccttgcggtaatgatgaaatgccctgccaatgccataaatataaatataaatatgtaagaacaaaagttctagagagtgataatatggtgaagaggagtgccaaaacaacagaagaaaactacatttctctatatctaacagatatgagggagacagtgccttgccttagaatatggcaacctccattcacccaaaaatatagaaatgcaatactaataaaatagtatgctagcatttgacatagaaactaacatatttccaatatgatgatctattttggattagctaagcataggtgagtagtgttataacatgcacattcttaacatttagaactgctcatactgttccacaaatctaccatcaagaataaacaaaatgctccatttcagtccaataatgcagtcagaaactatgttataaagattttgtgacacaaacaagtcagacaaacaggaaataatcaaatataactaaggtactgtataattagatttcatagaccagtgaacaatctttttaatctagaatacaacttaggttatacactaaccaaccaatatgtttacttctttcactataacaaatctcacatgaaattgggaaaaggaatgaaactacaaaacagaaaatatgcagtagaatataagaagcaagagaatttggttttttaccaatatttttccaggccatacagattgcccttatggtagaaatccagagtgagttgttcaaaatcatcgtataaatcatctctaaattccttctccaatccataactgagcaagaaatcattcaaaaattagaagaactatgcttggatgtcttcaaaggaaaaataaaaataaaaatagacaacataaagcaatttaatcagcttctccaaagaaacaatagacgaaaattcagaagacttgaaattagcctattactttactcaacaaaatggaccagaagatgaaatctaaatgatggttctatcttctcaaacaaatgagaaaagacagaattggaattggtacctgtaaaatctgaaaaggcactctataccataattataattagccgcagcatcttccttagctaatttcttaaattcattatacatagaaggcacaaacatgtctcgaagaaaataggaccagaatctgtataatgtattcatttccctgcattgacacacaaaaggaggtgaaagaaaaacctaccagaataagcaagtgtatgattgaaaaagaatataatacaaaaatattaaatttgcaaataatatgaaaaccgaaatgtataaaaaaaatatgaatgcataatatacaaagtgagctaatgaagatgacagcactgcatccaggctcattttgatatgaaagcttcggctaatgacattgttaagttaaaaagagaaagttgaccaatgcaaaccaatattgaaaatgccacgtgtcgtaactattccacaattttcactcgaactattgcaacatactcgtacacaaagtactttagaagataagtcattcaattaacaaattaagtaataaaaaaggcaggcaatatattcaacattcggtgcatgatgcacaataaaagtaacaggaacagaaattgagaatgagttcaatcggtgggctaccaatgtggttctttacaaatattttttcatagaaacgtaagaaatggagttcacctagctgcaactaattccaagtttctttctatcattcaggcaccgtttgtgatacttcaagtacctgaaaggaagaatactaacatgaggaatttttaaaaagcaagtcctataggactatatcctagtaccactctcatgcatacaaccagtatgcattatcatttacttctgttgtttgaaaccgttttcttctaaaagttggtgacttggatgctgaaacggcggaaaagaggttggcattgaacccacaggcggactaccagcgaaacccccatgtggactaccagaaaaccccccatggggactactagaaagaccaccatgtggtgaactactcaatttggaaggcttgaaactgcaaatttaagataattaatggaaatagcttcagttgtcataccaaacaatcaacatgtcatatcatactctctgaaacagtaataatttatattcttaatttaacaaattatttactatatattcttccagtaaaggataaaagtgaaaaaaaaaaaaaaaaaaaaggctggctaagcaaaccaatattacagtcattagcactgggaacaatcaatttgaactgacccgtgattttcaggaggcgtagaagcaaagaaaaacccaaccgaattactaggcgggctttcagatatgattccatgagagtttcgaccagttccatgatttctaaaattacttgagaaaaaccgctgcttaagggaagatggttgcttgtgaaaaactttttgtttccttcgagaattatagcttccagactcttcaacactgtttccaccaatattctcaactgcctttatatttgatgcacccgaattatggcttggagattttatgtttcgatctctgctatcagagttattctttctacgattagaccgcctatgtttcagttcctgtagataatgggtggggcaaccaaaaatttaataaagatgatgacctgaaaaataaaagacaacagggaaaataagaatagtgactcaacctgctcgtagaagtaaagaccatcatttattgcggaagcaagctcattggtaatggatattgattctttactaccacctctagatctttgtttaggatcaccattctgtacagtagcacgtagttattagaatcttacaattcatgatttgaatcctacgttcaatgcttcaatacgatacatctatctatagattgtatcataagatgaatctcatttcattctttttttctttacctttcttttacctattcacgtgaaagaaattgagaagtcatataagcttaaattgttaaatggaaaggaatatgatgagcacttacaaacttatcctatttgattattgcacttattttatttgtcattcattcaatgcatgcactctatttagctatttcattgctttgttttcattcttctaaaaatagagacttcacaaactaattttgttttataagatgtttgattaagttgtttttatctattttaagtttaaactattacattaagttatttttcattgtctctgaatccgatttgatgcaaataatgattcacgatttgaattttgaacctcaatttgataaccttgctttaaaatataaaattattaaataatcaattaattgtaattaacattctaacatattatggttaaatcagttttcgttcaaacaaaaaaaaaaaaaaaagacattacatagccgtatagttataacttataattaagtagtatacagagcaatatagttatgtagttcccgcctctgaacatccatcaaatcagaagaccctcaaattattttaattttcatcaccattgctgtttgggcaatatgaatgtaaaattgaaacctaatttgaatgataccactttagaggaaagaataaacatatgaacttgatttaaattaaattataaacagcaatacctgggtgacaattactagtctctgaacatcctgttcaatgacagtcatctcatcatcttcatcatcattccttttagacaacaacttccatcagatgaatatttgaacaaaaaagtgaacatatgatatgcttaatgaaaatggcacaaaaatcacctaatatcattccatatgggatgcctaaaataaagacaagtattctaacatctcaaacagaatactaacacagttttaacaaggaggaaaagaggaacctttgaatttcacattatgaataaattaatagttgtcttttattaacttcgaagaaaattgtggaaaatatatagaggaacctttgatattttatattattacattttttttatccgctcaatatattatcttttaatttttttttgtcaattaattatggttccttttttgcaatattcaatactttatttttttgtatttatgtttttaaaattgtatatgaataaattttggatactttttttttggtgtactggatacttttatttatttatttattattattattattattattattattattattatgatttaagattacatgaatgactggctcaaaaaaataaaaagattacatgaatgatatgcataaataattaaaaaaaatattttttgagaacttgtataattttcttgtaacatactttgtgtcattgcggaggatatcctatcctatctaatataattccttcttgatgaataatatttcacccttccattttttatatatttttataataatttaattttttaattcaattttttcaatatagttaaatttttaaataaccaacacacaattaattttacaaaattttattataattatcaccttaattattataataataataatgaaaacaactaattttatactaactaatcttaatggttattataattattatataataaaaaataattaattttatattaactaacttaaaaataaatatttatacgtacgagagaagtgtcaggactcaggagagggtctgcccccctctccatccgtgatgacttttatcaaccctgatttttcttttcatatgctaatatttaaagtttaagcacgcttggataaattaatatttaccatgtttacataaattaatgttggaaatgtattaccattccgcaccaaaaaaaatgtattttcattaaatccaaaatccaaactgcaaaatttattttttccacttcatcatttcaaagtcatttttaagttttatctatatatccacataataatgtttaaagtaacatattcttttattgacaaatattaattgttaatttattattatttgttaatgagaaaattcaaactcactatattatatttttttcttcaccactaaatcaacctgtttttatttataaaaccaccaagccaactataaactggcatatacgggtatacttatatacatgtctaattcatttcattgaagtttagtatttattacattttcattttttttaaaatcaataaagatcctcacggtagtaaaagttcagtaaacatctttctattttcatatgctttcttctttccaaaatataatttttattttttaattttgtttgttccttttataagatttttttcaaattatcttttgcattaattatattttaaccaaaatattcttaattattttacgataaattttatgaattaaaatgataatctcaatagtaaacctgttttaaaatccaaaccaaattgaatggtcgaaaatggtttgactagatcaagttggttatcagacaagttatgcaatcaacttggtgcaatccgattaggtttgttgataaataagtaattaaccttttgatcaggaccaaatcatgtaacttttttttgctttaaaatgactcaaaatgacacaactttcttgtaatgtgattattgatttgtgtttcaatactacctcaatttgttgtgtttaaaaaatgtctatacttaataactttaagtacttgacactttgattatgtttatgagtattttttttttaaactttttaatataatttttttatattatttttatatagacaggatcatgcaaataaattagttatttattgacaaccattgatccaaagctttaagtatgtcgccttaactatttcgatctttaaaactatggtagtagggatctataaatttattaaacttacgaaaggaaaattagaagaatatccatatacgttactgattttgtgacttcattttggtttcgttaaaaacaacttaagtggcagactcgaataaatgtgtttctgattctttttcccttttatttttgagactagaccaaatttgacaaataagtcacattgtcaaaactatagatatagtatcaacatgtgtgtcggacgtttttgaaaaggaaaagatgtaaaacttaaaaggactaaaagtgttgtacatgttactgacttaatgtctattggcaagtacaattaagatacaaaaatgccacgcactcatctccacgacaaatggaatgaacaactatgccatacattggtgtcaaaactgttactgccaagtcattggatacagaagatcttgattaaattcacatccaaatcacatgctcatctttcgtctccaaaatgaagattatgtttaagacctttgcttcttgggtttctttcccgatgcttgttctgatgatcctacaatatatgtctcggcacttatattttcttcagatttacgcttcccaaacttctctgtttttttctgcggacgaaccattttgaatttaagtgagatgatgatttatttaagagaaaataccagttaggcaaagaaaccaacaattctaactggtcaaacaagaaagagaaaaaattcttaataaagttccgccagaaacttatttacctttaaggacattgccatgttagctacattattgttagcatcctcagatttatccaccagatttgcaggctcctaaagtaaagagtgcaaataaaagttttgaaaaaaaaactataaaatagtacgcacgacataaattgttgtgaatagtagagaaaatcgcaaaagaaataacaatataaaccttgggtgggataaaggcctcttctcttttccttttgttttcagcagttttctcagcctgcttctcctgcttctcttgccatatctttgctgatttctttttgttacttaaaaagtattctccagtttctaattgtatatcaatctgaaatgtcacataaattaccaaagacaccttaaaatttatttcatagattaacaaagtaccagaacaacatagtttgtcaaaaacttagatataatacagatacactaccccaggggggaaataaaagaaaaaagccaatataagcagagggcagcaagtagttgtggaattggtgttgtcattctcatttaaaggccaagatgaagttcatatattcacaaattgctcctagataatgcacacttgagctaagtctgatacactcgttatgatagaaagtagaaacccaaaaaaaatacctaagatacccacaaggggaccatatcaactcctgaagataaacctcaaagttgaatcttaatcatctttcacaatcaatcacctatgtatgtctattgccacaaattaaagtggaaggtgatacccctcaaaatatcagttagagacaaaatacaaggtttttactttaaaaaatcaatagcaattaccagaaactatgataggaaagcaaatgcttaaacactaattacaacatagccagaaaatgcaggtgggcgcagtcgggtcctactacaatacagaacaaggaaggggaagaaagggattcgaatgagaaagaaatcaggctgaggaaggagctacaggaagaagtctgggtgacagtgcaatcaaaagaatcaaaagactagccataacagctggcggatttggtgggttgctctcacatggtgcatttggaatctcagaaacagaattgttttctcaaatgaggagtttaatggacagaaattgatggaggatgcaattttcttctgctggatgtggcttagatatttagagaatgattttgagctgccattccacttttgggctagtaatattaaatctggatttttgtataggggagggattaggccatagacacttttgtaatgggtattcctgtgtgcctagggttgggcattatggtattctaatattcatagaaaatttccataccataatcttacgttgataattggcacactcggatgtacagataatagtactactggtactacttatatatatatatatatatatatatatatatatataatacataattacatacatatttttgctagtcaattatttactttgttgttgttggggacatgagtagaggagactctgtacattagtggaagaaatccagcttgatcagagatattaattagaggttgtcttaccttactgggctgttgaggtggagggaaaggagtatatggtttcttctgtttagtgttaaccttcttttgcttaacatttttcctacaaaaagatatgaagcatcaatgaaactgaagcagagggtgggtgagtaccttgaatatacaatttatcaaataaataaaaggcatacttcttgaattttggaaggaacctatcccagttctcctgggcaagtgctggatccttttcaagttctttcttcatcataagaacctgacaatgtgaaaagaagaattgagatattttctacgcccaaaatctataccacaaaggcaagctggataaaatacaaattaaataaccttaatgttgtatacaggatgcattttattcagcatgcattcttcaacaattcttctgacttgcttcaagcctttgaatgaacccatagcagcaaccgtgtttccctgtggaattgcgtgcaaaattaaaaagaaatcagctgattctagactacactcatatcatagtgaaagtaaatgtacagtcttcacattctaaactatgaagcataagtcaaacttacttggacgagaatgtagcagccagtgagtatttcaagagcctgcaagccagtattatagttggagaaaggtgagtcacaaagttgaagccaacaattggtggtaagcagtaccagaaaaccaaagcaagaaagtaacaacaaagggtttatcccacaaatgctgaaaaaataaaatcttcacaaaaagcacaccttcaaggtggaagaattggggcccacaagatgttgccttctttttacaaatcgctcctgcagtcagaaaatcaagggaacttcctaccatcagactaatttctttgaaatgcttaagttgcataaagtattatgacaaaatacaaaaatcatatggtagaatacaaaatcaaaagagcagttcaagtaaggataaggggaaaaaataacttccatggcagcccgatgttttcaaatttctggaatgttactaaggaaggtctcctgaaagtgcttagttaatttcattgcaatggaaagcttgaagtgtgcgtgttcagttcaaattattttaatgtgaatttttttagcagctaaagagaggactttgggggtacaattcaataaagcttaaccaaaaatagcttatgaattctatttgtattactctagtgcctaagaaggtaatagaacaccaattaataaagtaataaattattatattgaacactgaaatcacacacaacatggcaatacacttgctgccccagaaacaaaagtccactgttacacaaatacagccacacccttgctgtcccagagacagaagtctcagtattctctttcaacaaactgaaaataacttgacagttgacactacctactgtcagatatatactcctgatacataactactatcagttattttctacaaataactgtcataattgcgtctaaatctcagttcccatgtatactaagacgaatgattattgctccacaaatcttgtcagtagtgcatacaattcctgaccaagtgaccattatcatgagggtagtcaatcacacgcagtagcagcactatagaactggcagaggcatcatcgctaatagatattcaaagataaaacaaaacaaaaccatagaggcacacagcaatcaagaagaacacgcagtaaaacatttgcaaaatcttcggagaaaataccttattacgaaccatgccgctgattttaatgatgtcacattgcgtctcatcgtcaagtatttttatcgcctgagaacaatcatagcaacataaataacattaatatgactgaatttttttttataaaaaaaacagaaagaagttacaaacacaaacacacacacacacacacacacacacacacacacacacacacacacacatacctgaggagcaggaatacttcgtgatagaagcttgataagatccctggctttgatgataatataggggtccctagtcttcctggtggttgaaacagtcatggaaccctcaacctgtgcattgtcacaatcaaaggcgaaattagggttttggattgaaactagaggaggaaaaaagagagtgagtaacagagtaaggtagttacgaggttgagttcgcaagcaacaccgaattccttgagagaggatttgaccatgggccaagcttcttggaggtacttttcgcggtactgagggaagagagtggagaaggagctgacttcgagcatgccgccgtcgttccacgaagggtcgaacttctcgatcttccagtggtcgatgtttgggtcgtcgtcccatggcttcggcttgtcgtgcttcccctttcgcttctccttctgttcaagtgcttgaggttcttctgctacgccattctcctcatctgagtggttttccatcgctgctttctgttttgtttccggtgcacttgcttctgctaggttttcaggttttgtgggatgctatgctaatgctattgacctattgtttcaactttcaaccaaatgacaacggttgaaatgaaataaaacgtgggattggctttgggcttagagcccattcattttaatacttcatcttagtattttaaaatgtgtgtaacttcatttttatcaaaacttcttggctaaaatattgtacttgtataatttccccactatataaatatgtaacctcctagaaggttcttttcgagataccgttggacactaaaggtaagtatctctttcagtggagtttgaaccttaatttatcataatgtgaaaaattaatccattctactaaaattccgttagctatacttgtataattaaagagttatatatatatatatatgttttgtatttcaagatatttaccaataggaattgagtctagtaatctataacatgacaaattaatatttgaattcttgttgaaaaaaatacatagaatgattcaaccaaaaaataaaaggatatacaatttacaagaaagttcttaggtacgaataatatgaaaagtaaggaatgaaattttatcaactaaaaaattattaaacatacatgatggttgaaataaaagttaagttttcataaaatttctttgcattaaaattcctgttatttgttaattgagttcttcgtactaatgatcttttctttagaatgttagtaacacattaacatctttcgaatacattttttaattggtaattgatttttttagactcgtggaattcttatgagaatttcacttcttatataataaatttgattgtcgaagaatattaaatataagttaacataattaaaatgtaagaattatattttgggttaatattttcaagaaactacaaaatcttaatgtttgattcgataatgaatgtgtttctgatcttcatcacaagtgtaatatatggtgtaacaaattgtgggtatgggtatcatcaccgaaccaacattgtattccctcaactccccaaatttcagattttcttaacgaaaccttaccaaaaaagagaggtggtgctaattattaatatattaggatttaggggacccgtattattttacgtttctttggcatgactagttttgaaaaaattcatggaggttttggctatggtacgaaaaatgagactagagaatgtatcttgaatgttgcactaacctacgatttgatactagcgaacacttttttccaaaaaaagggagtctcatcttataactttccatagtaactaaaatcgtagtcaagttgatttctttatggttagaagagaatataaaaatttttgtattgactacaaggtctatcctggagagtgtgtcgcaacgccacataagtttgtagttctagaggttcgattcaacaaagtacttagtatgaggaagatgactcaaaacccaattataagatgatggcagctaaatgaggaaaaacaaatagagttcaaagaaagcatgttgtgtgaaggatcgtggaagtctgtaggagaaacaaatgaaatatggaatgagatgactatgtgtatccaaaatgtagaaaggaggatgttgagagaaagcaaatgaaacatatttcttacaaaggaaacatggtgatggaatggagagggcagaaggtaattaaacagaagaatgaatgctttacatctttgcataaaagtctcaatgatgaaaacttgcaaaggtttagattagcgagaaaaaaaaagcaaagaatgtaatgcgggaagctagggacaaggtttttgccgatttgtattaaaaccttgggagtaaggatggtaaaaaaaagtatataaaaacttacaaaaatgagagattaaaagagaaaagacctcactcaagttagatgcatcaaggatgaaaataaaaaattttggtaagagacgaagatgtaaatgaaatatggatgaactactttaacaaactttttaatggaggtggagacaaaagtgaggtcgacttggagaacgcttatgatgatctaaataaaagatttgtgcgcagaattaatacacatgaagttaatgagactttaaagaggatgaaaaataataaagttttaggacccgatgacgtccctactaaaatgtggaaagaccttggggatgtgacaatcaaataactgaccaatctttttaataagattcttcaaacaaataagatgtctgatgcttggaggaaaaatatgttaatgcctatttacaaaaataagggagatatgcataattgttatgactatagagacattaagcttatgaactagctgtgagagagttattaagtatcgcttgaggagagagaccaatttttttgtaaatcaatttggatttatgtcacatgaaagctatttttttatacgacaattaatgtaacaatatcgagaaaagaataaagacttacatatatgttcatagatcttgaaaaaacatatgatagggtcccaagagaagttttatggtgggctcttaagaagaaaaaaataccattaaaatatgtaaatacaattaaggatatgtatgatgggactaccacatgtgtgaaagcttgtaatgaaacatcaagttattttcttatcacagtagatgtacaccaaggttcggctcttagttcttatctatttgccttagtaatagatgaactaacaaaagatattcaacaggaagtaccgttgtatatgttttttgcagatgatattgtgcttactgataagaccaaagatgatattaatagaaaacttgaactgtggagaaacacattggagcctaaaggattcacgttaagtcgaaataagactgagtatatgaagtgtggattttcgctggtaaaagatggtgatcaagatcccgtgcatctatatggtccagaggtaccaaagaaagatgtttctagataactagaatcaattttgcaaaaaggtggagagattgatggagatgtaaatcatagaatcagagcaggatggatgaaatggcggagtgcatctggatttttgtgtgaccgcaaaatttttcttaagctaaaagaaaatttctatagaacaactgtaagacatgccatgttatatgaaactaaatgttggccaacacatagacagaatgatcataaaatagggatagcagaaatgaggatgttaaggatgatgtgtagttataccaagatgaataagataagaaatgaagatattcgaagaaaggtaatagtagtaccggtgagtgaaaggataaggaaacatagattgaagtggttttggcacgtaatgagacgttccctggatgttcccgtaagaacaaaagtttgttaccaaaaactctgcacaaagagagatagaggtagaccgaaacttacctggaaaaaagtagttaaacaagatttaatggagtgagatataaattgacggatggtgtgtcttaggacgaaatagagaaaaactataagcttgatgaaaagttacactcattgttatctctatgttctagatgatctttttttagcctttttcctcttcatctccccccctcccctctttccctcttcttttcttttcttttctttttcttttatattatttccctttcccttctacttcaccttccactttttttttcaaccttctcgtatctatcattgggtcatctaccaccgaccccaattaacgtggattaaaggtgttggaatgttaatgttgaagttgtataacagccatcctaaggaacctacttctgcaaacattcggttggaaccgagtacagaaaaggagaaagcaaatggaagagataaagtccagcaaccaaatatccacttccaaagtatagtcagtatcaatagtctactgcagataagctcattttcaattatcactctgcactaacaacatacacccactgatgacatttacattaaaaaaaaaaaaacctgcataacatttagtctacctgctttttctaaactttccattgaaacatggaaaagttgaacagaagagggttttccctcttctttgctgttttcttttttaccccccaaattttcagcattatcacctacattttacaaaagaatcagagagataccagtgtgacaacatatatcagattctctgcctgacccttctaccattcttgtcaccaccatctgaaagttggccccatacactctgagatttttccactgcactgcaaccctcaccttcacacccagcaattgtcttcaggatctctgattgtagccatgggcctttttctttcatatgctcaaatccatctgatctcatgacagctgcaacaagtccagacgcaaaaagagccatcatatcaagaatgagaaaagttggaagataaagcatgattgtaatttagtatgcctgaagtcaagaaattttgttttgttctccactagtatttatgcataaactaattttagctgaggagaaacttattttatttttctttcttattttcttctcctacaagtgtttatgcaggatcttattcaaaataggcctatctatacaatctatcttttctgcttggtacctagttgtgtatgccagacagctgtgtttagttagcacaggatgcatgtatctgaactcatttttcttttacattttttagtcacttgttaacaacaaaagttaaacagaaaacatcagtctttctgttagcacgattgccattgctaactaagaaagtaatacaaattaagtatacctgctagattttgagcagcaaattttaggcaaacagctttcaactccgaggcatggcaatgatcagccaaggttaaaatattggctacagaattcacacaaatgtccttacaaagacaagattcacacatcaatctaagcctacccaagccatacttgtcggctgcagctaacaattttgctgtcaatgtctcagaaactggaaaattgctagttgtggttgatgaaaccgcgcccacctcttctgtaagagtatctttgtagataaagtacagcatggcctgtaaaagaggaataatcaggttatccatcctctctagttgtactttaactcttgaactcctataagatcctttttctatcaagaaaaagaaagctaacagaaaaatatacaataacaaaataaatcctgaacaagcttgatgctaccagggaaggaaaataaggaaaggggaaacaaatagtttttaccttaaaaacctttggttctaaatctgttacaataatctcattcttttcctcatctaaaccattaaaaaatttagatcgaaattctggggatctggcagccaacatcaacttatgagcagggaacttttccccggctacatcaaaagtaatatctgaaccttccatattatccaatagtgcaccaaagtgtgatccaatgtcagattctgggatgttaatagagtaaagttgtgggcaatcaattgctgaaaccacaactccaactgtacagttgatttttaaacaatcactcttgaggaaatcagaggtttcaagcaaagaccgtctgaaaaaccgcttgtagcccctataaaagcacaaaaaagagatcaagattttacacatgttgacacaacatctgaacagcatacttttagactgatctagcatcaattttccatataaggagagcctgggagagataaccagggactgaaatcaaaaacaggaacacatcaataaccctttaaaagagagaatattttttttgtttgtgaaaccttcatgcataatatgacaatacaaatctttatataaaccattaaaaaacataagaactggaaagctaactgacctgtataacctttttggtaagctaattacaaggacaagatcaagcatgatcaataaaaagaaaaggaacaaattatcctaacactctttgagatttcgacaaatttcccccaatatgtctcctttttttacccttacaacgatccacttaatggtatgaaaaacattacactaacacctcttgtcacaaacacacatacattacaccgtctacccctataaagggttgctataaacatgaataaagcaagtagtcatgcacaatgtcaagaaacctcagggagtgttagtgtgatttgctcaaagaaaaaaagaagataaatcacgacttccaaaagaaaaaatcacatggagttttagtaaattgatgtacataacaacgacaatttcatagtactcgagaaggaaaacttagatacagttccatatgtgctacttttggtgttgtcctccaataagaaattgaagtttcacttcggtaattcgtctaatagaggtttccactaaataccaatgcaggattcccagagtgaaacttcaattgtaataggagaacaacaccaaaagcacctatcgaactgcatctaaattttgtcctttctctttatattattgagaaaccacggtctactgatcattaaaactttaaactacaaacattcaaaacatagatgcacaatcaagataaaaaaaacatgaaggcgccaaaacagataaagaaaggttattggcagcagagcatggtaccacatgcttcccttgtacttgagcgtgtagggaccggtctccagggagcgatcgaaatggctatgaagcttgtgcttcccctggccgctctggtcaaggagagtgagctcgaagagcgccctgacgtcggtgccttcgctggccaaggcgatgaagacggagacgtaggcggaattgtcctcgggattcttgccgtcggggtagaagtagatcgcccagtggtaacctcccaccgtgaacacgtcgctcgcaatgtgcttccccactcccatccctttcgccagcgaatacccctcgatcacgaacttgtgcgaaccgttcaccgtctgcatcaccgacttcgaactcgtcggcggcgataacgccgctccggacatgcctatccaaatcggaattcaaggttcatgcgatgtggcgacggtgaagggattttcgcgaatctgaggtatttggaatttgaaatttttatttgaaattttgggggagaggagaaaggagaggtggtgtgctgggcggagaacggaataaagacgacgccacggggtgcgtcacggttttcaggtaacgttgacgtcagggggtggggaatatcattgctgccccctgaattggaaattttctagaatgtttgtgcggtatactaacgtggagctggagaagtgttatggatggttaattttataaaattattaatcttttataaaaaatataaaaaatatcttgagttgtgttgatccatttagaatgcaaattattttgaaacagaggaaagaaaacatcaatttattatgtaagaaattaatttttcttttgataaattaaaaattagattaaaagaatgaaattcatgttattttactgacaagttagatatattctctcaaatataattgttttattcatttatatttatagaaaattacaatatcataagagatattcattgaatatcatatatactcatataattttataatttttaataaattttaatcaataagaaaaaatatatttaaaaaattgtgtcttccgttctttttttatgttatctaaaaataattgtgttccacaatgtgtttcaaagaataaaaactgtcttgtggggaaatgaatgtattaaattctcggtagttttaaaatccatagattgatgaatttttttgaatttcacccttcaactttataaaatcacaaacatatttagattaaacacaaagtttataaaaaatcacgagtctctaccacatcagacttgttggtaatgtagcaaattacccgattgcgaatgttattcattcaagttggtagttgacaaaaagattaacattgagagaaaaaatatagaaaatatttgatttaatctttaaatgtgtagaaaatttgacaatttcatcctatcattaaatttgttggaccatttattattaaattataatatgtaatgagtaattttatattaagttgaatatataacataattgtcacatcttttaagtttttacacattcaataactaaataattatttttgtttttaatagactaaattgtaactaattacatatttaaagaacaaagtgattatttagtcttatataagtcactcttacccttgtacaaaatatataaatcaatctcatctacaaaataatttatttagaaagagttggataagaaagactaattaataattatctaaaactagaaaacaaatagttttttaatcaaggaatgtaaataagtcaaattattggtgaattactcaagtttgattaattaaatattcgatcaagcttgtttgtttaatcaaataaacaaactcaagcttgagtttgagtccgataatttaaataagtcaaacttaaactttacaagataaacattagtaacttatgaatagtttgtctatatgatattaaaattagatttaaatactttcatccttggaatagtttcggctctacattttttttttgttttaatcattacaaaatatgtttattttaattttcattaagtttcgtctcaaacaaaaatgtataaccattaagttaattcttacaacaaaaatgagacctaacttgattttgtcattatctaatgttgttaaaatataaatttgagaataacatacaaattatgtttattaattaatattatgtttattattatgtttgttttaagttatgtttgttttccttatttttaaatatttattgtaatgttatatttataatgattaaaaaaaaagaatataaagattaaattatattttagatagagaattgacgaatttgttattgaatgtgtaatatattgacaatttcgttcataaatatttataataacggttgaaaattaacgtaaggataaatttatcaatttttttttattttcaggataaaaatttaaatttttatttttcaaaatacaaattttatcattattttacatatttatcaacaaaattgattatttatcctaaatataaatattggattacaagttcaacttctacattgagtagattgtcacaactcacacgtgacacggccctctaaacgtcttcccccactcactgttccccttcaccaagcccttgccaaggtcttggcgcaagacgttcgcgctcccgaccctctcccgccatacccggcctccgtcaaggatagttacgccgtcgtagccaccgatggccccggcgagtatcccgtcgttgccgaatcaagagcaggagatgacgctctcggcatcactctctcccctggaactgtcgctcacgtaacaaccagagtttcgcttttccacttcttattttccccattccactttcattgaggataaacttctccgtgatgtttaaaatcaacttacgcatatagtttttagagaaattagacgaggatttttctgtataaatcaattacataaatcaattttagtttatgagacaagttgatttccttttcttatttttttttaaggtttatggataggttcatccgagaggaaatgttatttatttaacttaaatatgttttgtcctttaactttagataattatttttttagttttttaaaaaagaatttatttttactggttcctcaaattttttaaaagtcacttttagtccttcttattcttcgtgttaatgatatcacaatttttaataatttctcactgtcaaaatgttttttaatttaatttactggttcctcaaattttttaaaagtcacttttttaatctttcttattcttcgtgatataacaatttgtgataatttgtctctgtcaaaaatgttttttttttaaatttaatttctttaaaaatgataaacatactgaatatgtaaaaaatcttagacaattctacatctatctttttatttttcttctttaataccagcatttgaggttacgtaaatttccaaagtacaatagtttttaagatagtttgcttttttgggtttagattcatttagtttcttttgtatgcagggtacaagctcggctttgtcaacccataaagacagatccagttagaccagaatatcatcgtgcttctgtgatatgggctgacaatgatggaacaggcaatccagggtaagttgaagatgaattgttttgttcttgttttgttctattgcatgtcttttcattttttttttggggggagggggaggtgggtattatgcggagggccagagcactgttgctaatttgatctggtctctttaatgaatgaattttttatcctgtccatgaattgcagttttgttgctgtgagcactggtcatcaggtgagcagccgactacttagtatgaagtcagctaatgccttgttggagtttccagcaacaggcagtgtagtttctgcagggaccgctgtgtaatctatcataatttgtgacctaagacccatggcatgagatgagaatcataagtcatcagactcagcctttgctttgcctggaattaaatcacataaagtaactactgattcttcaggggatgctgaagtcagagtggctattcttacagttagtgatacagttgctacgggtgctggcccagatcgaaggtattggtcttcattttatattatatactggtgaatgcaaacaaggagacatacatagagctggaaatcaggattaaagcatttttttttagcctctttggatttctgttttgaatgacgggagcactttaattgatttttctggtatttgatcaatttgtgtggaaagtttaagacttaagtagtttttgtactttctagataaagcaacttctactaatgaaatcttgcagaagcaggaactccacactgcaccttttttttttttttacctcctgaaactggtactaacaatactctagacaaggttaatgaggtattggtcatattcatcatgttttttcttgcttggcctccaaagttaactaggaatttttgttgttaatcgagtgcatctagtatactcttccaaaccaaagaaattttttctatggatactaaaggaaccaagcaatgtggcatttgttaccactaaagctagatttagctatgctcatctgcaacaggattcatatgtgttgaaatagtcaaattagccaatgttgcattatttggtaaatcatcttcctagttggataatgctgaatggcatctagatacacctctttgaatcattgtttgaaagaggtcacaagtttgatgctaaactaaaaagcgaacttgatattagtcgatgccaaaaggggcattggatgtactgagtgttttgcaacagtctcatagttgaagtgtttggaagataaaaaatctgttttgggcattgctctgttgtagtgtagtagtgttgagtgttctgttgactgcagaaacttatgtacattgtatctggctgaggcttcatattattgatttttcatgcatcctttgtataacacatggggtttatagttttatagtattttatgctgtaataggattatacatttttttgttgtcttatttattcttcattctctgtctttctcaattagctgtttgtgcactgcctaatgaataagttgaggagtttgaaactctttaccaaaatttacccaaatcttcatgcaaggaagtggctatgccccattttttttaaaaatggttgattttattgttaaaatgttctttgatggttttgcgtggttctctttttctttttatgggctgttctaggaaaatatcttattctcccacttgtacaatatcctatcagtaacaaccaatgagaaagtaattatctgttattggatggcagaaaaaatggtttgttaaaacagtttgaaagtctttttagtcataaattaattaaccgagggtgatgacaagaaataacaagtgttcttttagaaataataagaaaacaagaaaattgattataaatgaccaacacctttcgtatgattaaaactctgatggtttattaaaaagaatattaggagggatataaaacgtccatgtcttgtactgttgctagattttagttatttgagtttgaaggtacctattgtattcaatcttcacggttacagtatgattcttttagttaaacagttactattttcagaaaactcaaatcatatagattccaaagcttcttttatttgataatttgtttttattactagttacttaagtttcatccatttacttatggtatacaagtgcccttggctctaaaatggtgctgcattggggctgtatcatgagtagttaaggaaaatcttgcatttattgttgtaactagtacaacctagatccagatatgtaatctgtctttcttctagacttgtatttatcggctaagttatggtccttgatttgttgaaattcagatcattaacatgcatggaaacccaaatgctgttgctgagtgtatggaagctttattgccagcacttaagcatggtctgaagcggctcaggggagacaagagagaaaaacatcctcgtcacgttcctcatgccaaagcagctcctgcagatgtgtgggaacagagttatatgctagccactggtgttggctctgatgtctcttgttcctgttgcaattgaagttaattagtattattttcttctcggctttcgccttcaacattttgcccccgtgttcaaattcgagggatacggaatagtgcagttatcattcaatggtcgaaaagtttatctttatattttatcataaaagtaaaactgtgaagggtgaaaatcccaactaactgtaagatgattgtaaaagacaaataaaaaacacgagaaggagaattgaattatgttttgtaatctttataaaagcaatttgatagatcacatgattttattaaaaaaaaaaaaagaccttgaagaaaaacaaatctatgcaaagaaaggttagtctgggattaaagaatattgtcttaagaccaatgacaacagtgaaaataatttttaagaaaatctttttttttcaaaaaaaataaaattgaacaaattaatctctcctttgattagaaaaacggataaacagatgtttgtaccaaaaaagaaaagcggataaacagatgtaagggagaaaaagattaaaacaataattttatattgtttcaccccacaattcaaatataaatcgagtccttgacagacaatttctattactataattgagagatagaatatttctaatctccactttcgaagtatttttttttcgcaagttttttgacttgaactcgatcattttttaaaataaaaatttctttaggcttcacaagcattttaaagagaaaaaaaatataattattgtcttgtgaatgtagtatgaatgaagaagagatagttgttttaagtctctaactgaagaatatactttgaaagaatgtaaggtagtcagaattggagtttatgcagttttgaagtagtcatcaatttcattctcattgtatatgtttttcttgagagatgtagagggttttcagtcggtgagcattatccttctaagaatgtactagtattgttggacccatctattgagcatttaataattttgaattttgtagctatatttttatattgggaatattgcttttcttatttaattaacagaggattaggattagacttggtagagtttttcattgttgtatgtgataaattgactatttaaaagactatttttgaaagattactatcatgtccacatttgtgttagacagtagctattttaaggacaataattatgaagtgttaagaaaaaaaataagtgtcaattttttttttaatacgattgatattttttttcatttcatcaatagcttaaggatactctataaatcttcattcatttgcatcttcctttgctcctgaatctatagatagattttataagcaacactacgggaaattatactgcagaatttgagtcatttaattgtagatgaatgtattagaaatacaacggatacaatgactcaatgagctcaaattatagttgtgaaacctaacattttttactttattcttttattgaattcatgcatttacacgaaaatgaataaagtgttcttctctttacgtggacaagtagtagtacttgagggcgaaaatctcacagctcttggaagtataattcttcagggtatgatgtcaatgcatttttgccatagtaaaccccaagtcccacaagggccacaaccaagtagattatcaccatccatttcaccaatttcttgcacttgttcttccctgcctccaaatcttcaatgacttcatcatcaacatgatttgatccagaaccgaggctgaaatctattagccttgttttgcttcttgaaacaggcttagtcttaggagcagtaggagttggtgcttcttttgttttacttgagccttcatcagtctttgcttccagagcaccttttgtttcagttttgttggtttcctccttattctgtggtgtctttcgatcatagacttcaccattggtctttgcttcttctgctttaccttcttgggttggcttttgctgttcaaatttttgtgatggggaagttgttaatgtttccttgggcttagtcagtgaaagttctccaaatttgattgatagcttagcaccctcaaacttggcagtcacactgtcggtgtcataatcagaaagaagaggcaattctagattgaaacgacgccatctgttgttagtgatcagtcgttcacccattagccttagggtgggctttgaggtcacttgaaccttcaattgatcccttctaaaacctgtatatggtgataataatattgaaagcagatgaagcgtatttcttttttgattttgcaaatacataaagttagaggctttatttcttttggtaaccacagttattagatttacgacttttcagtgaaataataagatattctcataagttttaggttgatatgatgttttaaaaaaagtttgagattaattcattgcaaaaaagatgtatatatcatgcatgatgatatcatgattttggatagtaactaattataattcattatttagagtaaattcatgcaacctctattttttttcatcctcagatgtgataattctcaatatttttaactgaaacaactctattaattagttatataagattgatttaatggttaaataataacgaaaagaaaagaaagagagaaattgtggattcaaatttttcaattgatattttgaaagaaaaaaaacaataaactaacatttgtaggaaaaaaaataacctatcaattttattctattgttcgactaacaaataattaaggtgagcaaattcggaaatatttatacacatatagaataaattgagtattttctatataaaaaccagattgacgatgaacgttacctataaagacaaaaatatatgaaaacaaaactaatttctttatctgttgcttatgttataatttataacaatgaactaataattaagttgatattattcctctaggttagatttgaaaacttgaaaaaatatttacctggtagcataacattgacaagcctttcatttctatcccattcatacaatggtacaaagtcttcgtagacacgatcagatgctgctggctgtgtccttgaacccatttgattttatccttgatttgtttctcttttgcttttgcgtttgatgtatatttgcttcttggtattgaattgcttctagggcttctttttatactcataattgatgaggcaattaggaccattttgcacgcaaaatgtagtagcattttgtttgctttcgtagtttcttttcgtacgttcaaacactattagtttgtgtggcgcaagaaaaataatatgctttagtaacgagaggaggtgaccccgttctttggtgatgctaaaacccaaaagcaaaaatttgttccgagtgcaaatcttttaccgacaaataaaaaattacagcttaagcttttttccatctctcgatatactattagctgcttcggaggttttcaattcgctcgtgtaattcgtgtctacatgtctcactttctaatttctatatcagtgcttcacaagataaaaaaatgggttaactacattattagtttttagtcttttcttttcttagagtcatactataattgtatttgtctttaattattatatttatattaaaatatttaagattgtacgataaatttagaatatcacatgactttaaaattttaaaagttagaaattaatgaaattcagaaatgtattacacgatgtaaaagagagaaaagttagattatctatgtcaaagtttaatgttttagttggtggactttggagagagaaaaatttaaagcaacataattgattctgtttgtgaagatttttaattataaaatgagattttaggcaaaagaaaagtgataacatgcatgtaggattaaattcacttaattttaaaaatagaatgatttaatttacttgaaaaaattaaggaattaaaatcatgaattgtaaatagattaaataaaaatgataaaaaaagtattccaatgtaagacatttttcttcaagagattaaatattcattatattaaagattcatgttttaaaactttggtagcagcctatgaatgaagcatcgatatcgataagacgtttttgataagttctcatacgggacgtcgatatgttatttcaaaaatactaatattttgatatgttccttataagtcataatattaaataatatttttttatatagaatacattttatattaataaaatataataaaagaaaaattataaatacaaataataaattatccatacaaaattaataaatactttaagtaatatgtgaatatggaagaaaaacataatttattctatttatggcacttttttttatttataaaaatatcatttgaaaatatttaactaaactaatatgtaaaatgaaatatcttcaaaatatcggtaatagcaatgctagtaaaatattaaaggtgatagaagtaaatgtgaaaataataataagggtgattactctgatgtaagtagtcgtaggactcaaatcctttgcatctgttaatgttatgccagtaaattgcagtactgattactcggacgaagaatttaaacaatttttattcaaataaatcatcgtgtttttttttcttttcaaattttctcaaaaagaaagaaagaattacatagggaaaactggtctattattttgaatccaattgttcaatgatcagaccagttgttttactcctttattgaattcaatcatgcgttgacatgcatgaatattacgcatatatatatatatatgggaattaaaattccttgaattgctgaagttctgatcctcccttatgagatgacatgaatgcagcatttttgacatacaaccccagcaccataaccaataagatgaccacaaaaatgttcatccatatctttggcctcttaattagcttttcacacttgttaccaccaaacccttgcttaacaacatcccggtcttctactgatctcaaactcacagtgaaatctaaaacccttgttttcagtctctgggttatctttggttttgatgaggttgttgttgttgttcctaattcttttgctgtctctggcaccccattagtcctcaccttcttttcagcaaccacttcttctgttttgttatccttttctttgtcatcatcactaattggctcattctctttctttggtgacgactcttctgttttgttctcttctttctcatcactagttattggttctttctctttctgtagtgactcttgcttatgaacctgatcttgttgttgtgatggttctttctctttctgaggcattgttggagcttcctgtggctgtgacctagcagcaggggtgatgagcttttgaaacttgatgcttaggatcccaccctcaaacttagcactcacatcattggtgtcacaatacgggggaatggggaattctctagaaaaacgacgccgcttgttctcaacgatctgtcgttcaccattgatccttagcacaggagttgaagttacttgaacccttagttgttcctttgtgaatcctgttcatgttcaaagtatatatgtatgaaaaatgtttgatgaacatgcatcatactattttacacacagagagacttaaaaatgaaaaattataaatatgataaagtttatgatagtgattgaaagaaagaaatgaaaaatattgatcaaatatttaaaatagatggatgtatgtttatcgttacttaatatatatacatagaacaaaatgtgacgttaattgtgagaaaacatgattatttttaatcagaaaaataaaatactatatgatttaaagtttaaattaattagcatgcattgcttggtgtaaaagtttgcatatatatatatatatatatatatatcattattcaatgaaaaattatatggttagtatgatttttaagatatacaatttgaatttaattaataatcatacattgataatttataataattatataatgttattcaatcataaataataattaatatatgacttttaaaagaattattaagaaactcaacaaacgtattatatatatgttaaattataattgaatgataatttaaaattattttatattatcagtgcttaatctattttttatatatttattttaaaaattaacaaacttaatatatattgaataataatgtaaactatttacaatatatatatatatatatatatatattattttattctagggttcatgatgaattattttttctcaaaaaaataaaatttatgaatacgaattagaccactgagttgagaaggcagttgtttgcttatataataattaaatggagtattactataggctaaatttcacggatatatattgggtaaaattaaagaagttaattacctggaagcattacaatgagcgtgacacttccttcatcttcagaccattcgaaaaagggatcaaaatcttggtaatcaaatttagctgctgattgtgcctgtgccatagttacttttacttgttgatcttttgcttttgacttctcttcttgtctccgttgttggagaatgaaagctctggcagtgtgcatttatatgcacattgataggagattatatattatgcattttgcacgcaaattctagttcctgttaatttctctttttgctttattactttcttttcgtgcaaacattgtgtctctgttattagggtgctgattcacgaaaaattatatgctttggtctcgtagaggaggtaactttgtgttttggcgatgctaaaacctccacgtgattcctgactacaaatattgattggacaaaagttaaggattttttttcttcttttattaaagaaagatttgatttttttttaaaatactatattttaagtaaccgacttcttcaaaagaaatggttacatatatatagtatgttatatctaaaactttataaagaagacaacataaatatatataagttaattattggttgacatgttgattggttaactatgattgttaatcctttagtaaattggtatatttaatttgttaacaatgataataattgaatcgttattaataatttaagtgtgcgtcgtcgagtgcaagattgatttcatacgtaaaagaaattttttaagaaagaataataataatactcaataaaataagattttgttctccctcaaccaaatcatgtcgttatatatatatatggaagtctacacaagaagttttctccctaaatgtaaacaaaggaatcccaaaagaggttgtgtggtgtgttcctacctcacctttcttcaaattaaatacagatgacagctctttcagtaatccgggtcctttgggttttggtggtggttgtgtataactcataaataaatatcgaaaagatttaaactaataagttgttgagcaaatcatattagtgagtattattggaaacttacttgggcaatggattcaaggtttctacagattgatgcatcacctattatattttctcataattaaataagtttatatagggtattcataaactgatctaatttaatgtggataaaaaaaatcaaaaatcaaataaaccaaaatcaaatggattaaaaaattgaaaaatgaaattttttactgaatcatatctaatttcagatttgaattgaaaaatcgatcaaattcaatccaaattgaatttgtacatatgtatatatttttattcataaatttatagtattgcttatagtcttatttttatttcctatatattttaaaattatcatataacttataattatttatgaaaattacatttagttaaagaaatttttgtactacttaagatgggtaaatatattagatttaaatatgtttttagtcctttaaatttaagtaatattttttagtcattaaaaataatttatttttattagtccctcaaatttttgaaaactacttttaagtcctctttatttaatgtgttgatagtttcacaatttgtaattattttatcctcaaaatttatttatttttttaaaaaaataatttcgaatgattttaaactggcaaaatattttacttgtatgatttgttgactatttttttacatattttaattgttttaaagaagaaaaataaaaaatatagatatagaattatcatgatttatttacatattatgacatttttaaattgtcacaaatcaattatgaagaaattaaagtaataaaaaaaatttgacagtgacaaatcttatgttaccattaacttaaagaatgagaaggacaaaaagtaaatttttcaaaaatttaaaaaactaataaaaataaattcttttttgaaagactaaaaaaataattgtccaaatttaaagaactaaaaatatatttaagtcaatatattattattaattatataatgatatactaatctatgaatgaaatatttaatattttaaattatttttttattatatatatatatatatatcctatttcttatttaatattttctaaaaataagagtaagaataaaactgaaaatcaatataatccaaattattttaaattaaattgaattaaaattttaaactaaattgaatggatgttaaatcaacaaatcaaaataattatattgaataatttttttttcaaaaccaattaaatcgagttgacaaacactcttgttcacatatcaagagaaataaacgaaaagaaagtttcttaataatattaccagagcctttggaacctatccacttcttttttattttctatttttacttttattttttaattacaaaattgtcactgttttaagtttttcttctaaagatttatacagaaaaaaaggattgatttgagtgaatttcctgtgcaaataccccaatagggtgtcaactgatttagtctactttataaattattattataataaaacttcataaattataaataaactgaattgagcctggaagcattagaattagggtttcactgtcgttctgactatctctatcagatagtggtagaaaatcttcattgacagattctggtggtggtggtggtggtggtggtggtggtggtggtggtggtggtggtggtggtggtggtggtggtggtggtggtggtggtggtggtagcgacggtggttgttgtcgtcgtggtcgtggtggtggtggttgtacatttatcttttcatccgacattttttcacctgacctggtttctcctttttctcttatgttcagtgttaaaattgtctattatcttggagaatgaaatctcaggttatgttaattatatacatgcacatcgatgactacccgtgttttcttcaaacctagctcttccttttcgtgcaaagattgacttaactatgttaaggactttctcggttgtcctatgctagataaatagaaaataacaacacattgtctctccaaagaatactttacttgcatgctaggcaatgtgagcttctttctctctaaagaatacatttaatcaaattctttaatgtgtgtaaattaagataaagacatcagattgttccttggtgagggtttgcattattccttatatattaaggttgcacggacaagacaacaacttcatatatatttgttctttaatataaatattagccagtggcgaggcaacattgaaataataacatccttatcaatacttgaaaatgtatgtggtctgtcatatagaaaataagtgtaatttctaaataagtatataatttatttagtccttaaattttatatttttaattttttaattttttattatctattttgatcctttaaattttttcttgtccttaaaagaactaaaaaatttgaaaaaaatctaataaaaaattgaaagattaaaagtaaaaatcttaataaaattaggaattaaaaaataataaacttaggaatatatcactctaggaaatgcatgactcatttttgttgttgttgttattgtgtctcgatcttcctaatggtttctaattcctaattattattgagctatgtgagtaaaaaataatttcatatacaaaagaagtatagtttatgccaagatttgcggacaacaacaaaagcctaatctcacaactcactagttgaagtcagatacatgaatcaaatcatgctaccactactacaagcgatacctacgacgacagttgtaaaccccatacgacgacagttgtacaaatgtcattattgcgcatgtcgttgaaaatgagaactttcgatgacggttctaaaaaaccgtattcgttgataatttttttatttaacacctacaaagacagtttttaagagataaccgtctttgtatgttgatatacaaagacgatttttccttaaaaaccgtattgtttctgttttaaatatttttttgttttttttttatttaacacatacaaagaaggtttttaaaagataatcgtttttgtatgttgacatacaaaaacgatttttaagagataaccgtctttgtatatcaacatacaaagatgatttttccttaaaaatcgtatttatttccatttcaatttttttctttttttttatttaaaacctacaaagacgatttttaagagatacctgtctttgtatgtcaacatatcaaatatgtcaacatacaaagacggttatctcttaaaaatcatctttgtttcaattttaatttcttttttttatttatttaacacctacctacttttgaagttgggtatacccaacttgattaaagatcagatcttcggagatactatttattatgagattccactttaacaacttccccagtgcctttctttttctccttcttctcattttcactagactaaaacccatgcaaacttacacggaaaattgagaaaaataaaataaaatcctcttgttgtttctgatggttctgtcatgaaaatgaaggtggagaagatgttggcccattgctgatgcctgcagaagctttgctgctgatgttgatatagaggatttggggttcaactctttttggagaaagggagagagcaaggacttaaagcttagtaggttgcctcagtaagacaaagatcacaatagtattagatttcctttgttttttatggaaatcaagcctattgtgtcctttggcttctgagaaatactgttggtacagtcctactagtctagaggagcttcagagaatattagtgctaaaccgagtaaatggaacccggatgaagcttgttgttagtaatacaggtatgggatattacaaagataatgaagtctatgatatgtgtacattgatctaaggggcatttccgagctctcaaaggtcagaaaggatcgaaaagggattgaaactggagcagcagtgacaatatctaaagccattgaagcactaaaggaagagagcaaacgtgactttctctcagattatgtaatgatactcgaaaagattgctgaccatatgaacaaagttgcctcagccagtgttggtggcaatctagtgatgcccccagtatgaacccattggtgagccagtcatcaaatctggtgctgcactacaagcttcaggtttgtttagctcggagttttggattaagatattgacagctccttttctttgcatctccattgaaattattctgaagaccaaagataaaaagaggtccactcacctgtagcttggcttggctcaaagctgctcatgtcaccggttaccagctagctaatattgacataaatgtgattcacaatctctcactttctactttagagttgactaggcttcttttgtcagacactgatattttatcctgttttgatgcctttcaattatggtttttcatatttagttgttttaatttcatatcagtggcaagtatatatttatcaatatatttcaccaagtatcattgatatttatcaataaatcatatgtaggtgaggctatatttgttgatgacattcaaaaaaaaactatgtaccccattgttcataggttctttgctgtacgaagataaaagagagagatattgtacgcagtcttatccttgtatatgtaaaaagactgtttccgaattttaactcataaccaacaagtcatcaatgcacaactttaccactgtatctgagttcgttctcttattgatgacattccataaccaaaaaattgcctacatggaacatatatctatagttcaaaacctttagcaagggtaaagagtataaaactcagccctgaattggaactggatggagtgagggatatcatttcaagtaaagacatacccaatggggggcagaacattggatcaaagactagctttggtgaagaacctttatttgctgaagagatagctagatgtgtcggtgatcgtctggcctttgtgggcttctgtttcatttgtttggagactgataaaatgaaatgcttccagtttagtcaccaagtatcttctataggttgcagatactcagaaaattgcagatattgctgcaaacgctgagtcttgaaaatcttgaaccacctattctaactgtggaagatgccgttaaaagatctatcatttttaaattacctccttttctctccccaattcaagttggtgatgtgttaaaaggaatggctaaagcagatcgcaagattctttctgctgaggtacatgtaacatatccattgtttcctccttcacatctttgtggccatctctactttggtttctgatgtgatgtttaagtttgtttctgaataatgagtgttgatgagattatatagataaaacgtggtcattgtcatcatgtatcaaattcaatgttaaatacagttgaaacttgtgtctcaactctcaatactatttctacatggagactcaaactacacttgctgtacttgatgaagacaattgcattgtggtttacatttcaagtcaatctcctgagtatgttcattctaacgtagcaagatggctaggtattcctgaaaataatgttcgtgtcattacaagaagggttggtggaggttttggtggaaaggtcgtgagagctacgggagtaagtttttagtttactatgcttttgacaatatttcttctttattattagatctgttatcacttcttgaatatgactaattaacatgtagagtctaggcatgaatattcggactttctgtagtttgaagaattcactgttaaattaaaaaattatttataatttttaaaagaaaattgaaaaataactaatttttatcaatttttttaaaaaaattatacgactttaaagtaataaaaaattttacaattttgtagtaatattttgataaatttgttttttcaatttttttacaaaattgtaaatagttttttttaatttaattatttaataaataaaatatatttttacttttttttgttgatttaattaaaaaatttatatgattttacttattatttatttaatataatttttatatattttattaaatttaacatttttatttaaaaattgaaaaataaataaatttttcattttaaataaaaaattatacgacttcaaagtcgtaatttttttataattttgaaatcataaattaaaaaaaataattgaagtcttaaattattttacaatttctttaaacaaaattaaaagtgataactaatatttcgacttctaattccaattcagaagtctttaacactcgttataatttaccttcttttcataatttatttgaaatgctcctatttgattgtttcagacttaaagtctattcccaaatgataattaaaagaaaaaacgcagcctattggtgatttcccttcagggtgtatctgaatccaaagacagatctgataatggccggtggaaggcaccccatgaagataacttgagatattgatcaatgcagggatatatgttgattttagtccaataataccacgcaacatgattggtgcacttaaaaagtatgattggggtgctctctcttctgatataaagctatgcaaaacaaaccatcctagtagagctgcaatgagagcccctggggatgcggaaggatcatacattgctgaagctataatagaaaaggttgcagccacactttcaatggatgttgattctgtaaggagcattaatcttcacacatacacaagtctcgaggcattctacaaggactcttgtggtgagcctcacgcacgagtatactatgcctttaatatggagtaagttaaatgtttctgcaaactatgaaatgagagttgaattggtgaaagagtttaataggattaacacttggaagaaaaggggaatttctcgagtgccagtgttgtatgaggtgaatgtaaaaactactccaggaaaagtgagtattttttcagatgggtctgttgttgttgaagttggaggaattgaattgggccagggtctttggataaagttgttgaaacagatgggtgcatttgcacttggtgcagtgcaatgtgatcgaactgatagtgttttggacaaagtaagggttgtgcaaactgatattgtgagcttgattgaagcctctcaaggaaaaactacaggagaaaatgggttctgtcaactgggtgaagcttattcagcaggttgaatctatattttaaacatgagtaaatattgtattcattgatgttctaattgacttttaattcaattattcaatcataagtttagtggcggagccggcttgtaattttaggtagtgccaaattttaagtagtgtcaaattttatttagatagtaccaaattttatttttaatactaattaattatataagtatatataattattaaaaaaaaaattcatcccttgatataactgtaaatttaatttttttagctggtgtcaaagcccttgctggccctaaggtggctccgccactgcataagttattatatttgataaatttgttgacttaaataataattttttaaaaatcacgtgtatcatgattttcaattgattaacaatgcataaaaattaaacttttaaaatattgatgtgtatcttattttcttttataattttgtaaagagatgtctcactacaattttcttttatttttaattttataaaattattattcttttttatctatttattaatttttcttattttgtgtaaaataatattaaataacctttattttgacaaaaaaatatattttaatcaatcattatgatggattgtattattgctaccttttcatcacttattttgctctaatatttttaataaatattattttaatttttaatctaatattaatagtatttttgttcattcatttaataaatttatttttataaaattagtatttatttatttatttttcttaatttatataaaataacgaaaaacaacacttattttatgaaaaagaaattatatttataaattataattaatcattatagtcagtcatatcattatcattgctaccttcccatcactgatttcttatcttacctcccctgagccctgccgcactaatcgctcttttctcgttgaattttgtgcctggctctttggttttgccttcttcttcgttaaaacttacaaccacaagtccacccatcttctctatccttatcttttgccattttctatctcttccaataacaaacggacgaaaaactgacctttcacaccaccctgcagtctgcatctaaaaaagtcaaacacaatttttttttttgcaagaaataaagagataatgaataaaaaaatactagttagaaataaataaagtgacacctatcattagagagatggaggaaagatttttagggaagaggattcaagtcccaatactattttgtttagaaattttaaatgagttggatgattaaaaaaaaaaaagtttgtcgaatttgatcttctctattcttctgataaagttaatattttaataagttaaaatttgttgataaaaaaaattaacatttgcatggagcagcatgcaaaggtgcgtgagaaagtgcatatatagagtaaggaatcaataaagtatttgttgaattaggtggttgaggtgacagtgacagaatgaattggaaattatgataccaattccacatgcgtttttaaaaaattaacgttgtgcccatgtcgatcgagaacagttgactattgtgatgtgaagaaagatctgtaaggaacgccgactcgcacacattaattatatatgagagtttaaagttttcttctgttgctgatcaaaactgatagaaataacacttgctgagctatggaactggagaagacaccaccgacaagtttggtttttggtgttaatggtgagaggtttgaactctcccacgttgacccttcaaccactttgctccaattcttacgcactcgtactcgtttcaagagtgtcaagctcggttgtggtgaaggtatatactataagtttgtgttcaaccatttatctttttttgtttttctatttcaataagcttggtatttacgatatagattcatcttctttctccttccttctctgtaagattaatcgtggttccacttggtgaaatcctgaataaattttgatggtcttggaatgattttccagttccaggtcaaacgggttagttcaaagctgttgtgaccttgtaggatgctgcttcaatttttgcacttaattgtactccctttatgcttactgtcactttaaattgtccaataccccttttctggcccttttaagaagcagatacaatggaagaattataagtcagtatattgattaggctgatcataagcatgtaatgtacttctgtcaaacaaacaaaaaaacatgtactgtacttctgtaaaaaaaaaaaaaaaaaaaaaaaacatgtactgtaccggttcatattattcttgagctatatcaataattttcattttcatttatatatgataagttcttccaaaagtaactcttgatagtgttaatgttctccataactttttgtatatattaaatttccgcaatgcaacccataaacattttaatatcatttcaatcataaagaatctaactaagttggttgaattttggctaaacagtatgcgtggataaaagtactaaataattttgaaactataagaaattgtaaacttgagctattcaatgaaaacttttaatctaatgaatcgttgagagagagagagagagagagagaaagagagagaattattgaatggagtaaatctgccaagtgtttttcttggaataatttgatctgcaccctatatatttaggcgggggaattcatcttatttttctgatgctcaaatcatgaagatgaaggaggtgttttagtagtccaatttttattttatttttccaacttggtacttcatgtttagacatggttggttggtttcagggggttgtggcgcttgtgtagttttaatctccaaatacgatcctgtgcttgaccaagttgaggattttacagcaagctcttgtctcacactactttgcagcatacatggctgttcaataacaactagtgaaggcattggaaattctaaagaaggattccacccaatacatgaaagattttcaggattccatgccactcagtgtggcttttgtactcctggaatgtgtgtttccctctttggaactcttgtcaatgctgaaaagattacttgtccagagccacctgctgggttctcaaaagtaactgttgctgaggctgaaaaggcaattgcagggaatctttgtcgctgtactgggtatcgaccgattgctgatgtctgcaaaagctttgcagctgatgttgatatggaggatttggggttcaactctttctggagaaagggagacagcaaggacttaaaggttagtaggttgcctcaatatgaccgtaataaaatgaatagtagatttccgttgtttttgaaggaaatcaagcatgatgtgttcttggcttctgagaaacacagttggcacagacctattagtctaatggagcttcagagcttattgaaattaaaccatgataatggaacccggataaaaattgttgttagtaatacaggtatgggatattacaaagaaaaggaagcctatgataagtacattgatctaaggggaatttctgagctttcaaagatcagaaaggatcaaacagggattgaaattggagcagcagtgacaatatctaaagctattgaagcactgaaggaagagagcagaagtgacttcctttcagattatgtgatgatacttgaaaagattgctgaccatatgagcaaagttgcctcaggatatattcggaacacagccagtgtaggtggaaatttagttatggcacagaagaataattttccctcagatattgctacaatacttcttgctgtagatgcaatggttcacataatgaccggtacacaatttgagtggctaacattagaggaatttctcgaaagaccgccattaggtttggaaagtgtgcttttgagcattaaaattcctagtttggaactcaatataagtgaatcatcagaaccaagaagtagattcctctttgaaacttaccgagcttctcctcgaccccttggaaatgccctttcttacttaaattctgctttcctggttaaggtgtctcaatgcaaggattctggtggaactgtgattgacacttgtaggttgtcttttggtgcttatgggagtaagcatgcaatcagagcaaaaaatgttgaggagtttttagctggaaagcttttaagtgctagcattctatacgatgctgtcatcttggttacagccactattgtacctgaagatgatacctcaaaaaccacttaccgttcaagtttggcagctggttttatttttcagttctttaacccacttcttgacgctcccgcaataaacaatggttattttaatggacatattaatcttccttatgctaaggattttgagttaatagagaaccagaagcaggttcgttatgacaaagtttcaactttactgtcatctggtaagcaaatccttgaagcaggctgtgactatcatcctgttggtgagccaatcatgaaatctggagctgcactacaagcttcaggtttgttttgtatcattgagttttgaattgattgactgccttctgtttttgcatttctataattgtttcaaagtataaacttaaatatttacatgaaaaaaattggtacttttttgtattaaattccatttgctagaaagtgagtccttgtgcaattttaggcttgtaagcttgtgatctggtggtatacagttgtatagatttcaccctctctagatcctacaatgcttgcagaattgtgtgttggactgcccatcattattcacttccactgaatatgagacatcaatctctttgtcaggttcataaaaatatgtctctctttctccttagaagcttgtagcaacaagcaagtaagtgtgtcagatttttccctctctaaaagcctcccccttttcccttcctgtgattgtgttaggtatggctcatactatgccgtcagcagatatgcacgagggctgggggagtctccccggcgggggcaagggcgcagtgcccccggaacttttttcgaggcctagtactgttgttggtctcgtgttttattatttgtaatttaggcttgggcccatgaatagctacggtgctagggtttctatgcctatatatttctttgtaatctgagtgcaattgtacgagtgtgtgaggaaatatagtgaatagctggacgtagctcatattgggtgaaccagagtaaattctgtatgttgttttcttcttccccttctctctttctcctatcttgattgttgtgtgattgcttggtacccaacaatgatctcttgctttggagtagtctggtattttttttggttgaatccggggtatccctcggccgagagccaaggactaatccctcaaggtacatagatccatttaagggtctaacctctcccaacagatgtttttccatacacgtggaccagggatcgaacacctgaccacatgcttaaaagacaatattatcttccaaccatgtcacaccatgttggtatattcatttagtagcattttataaccaattgctacgtagcagaaggcaaaacccctatgttcataaaaaacttgttccccatgctcttggttctgatgaattgcgtatccatattttgcatcttgtctctggttaccttataactattgtcaagataactatgctaaaaagtccactttgtactgcaggccatagactagattttgtgtgtgaaagatttattttatcctgttttggtgcctgtcaattataacttttcatgtttaattttttaaatttttgttcagtaacaagtacatatttatgaataatcatcatgtataggtgaggttgtgtttgtggatgacattccatcaccatcaaattgcttacatggagcatatatttatagtgcaaaacctttagcaagggttaggagtataaaactcacgcctgaattgcaattggatggatcgagggatatcatttcaagtaaagacattcccaatggtggggaaaacgttggatctaagagtatatttggggttgaacctctctttgctgaagagatagccagatgtgttggtgaacgactagcctttgtggtgagttcttatatccctcattttgatccaataaagtatgagcttctttttcatttctttggagattgatatgtgaaatactaccatcttagtcaccggataccttctttaggttgcagatactcagaaacttgcagatatggctgcaaactcagctgttgttgattatgataccgaaaatcttgaaccacctattctatccgttgaagatgctgttgaaagatctagcttttttgaagttcctccttttctttatccaaaacatgttggtgatatatcaaaaggaatggctgaagcggatcacaagattctttctgctgaggtacattatttactttgcttcccctcttcctctcattccatacctttgtacaccttggtttctgatgcaatgtttaagtttgctcctgaataattaatgtttcattggttatgctgaacaaatattcatttgttatctatcaaattcaatgttaaatgcagttgaaacttgggtctcaatactatttctatatggagacacaaactgcacttgctgttccagatgaagacaattgcattacagtttactcctcaaaccaatgccctgagtttgcgcattctactatagcaagatgcctaggaattcctgaaaataatgttcgtgtaattacaagaagggttgggggtggttttggtggaaaggccataaaagcagtatctgtaagtatttagttatgctttaatattttgaaaatctaatatattactcatcgctatcactttttttttcaatgtagagggtagatacgaagcttcaaattttctgtagtttggagaagtcaccgataatctgaatttttttttttcttatcaccatatttctgtagacatattagtatatgctcttattagacaaatttctgaaactgtaaaagaagtttactccagtggattataaatagaagcttatgtcatgtcacatcatcttgaaatgtccatataagtagcttctttccattatatgttgcatgatataattgtcaacggcaagcctggaattagaataaaatggttttgtacttctgtctttttatttccttcttccttcaaaatattatgtgctgtatcttctccctttttctaacccatcctgtaagattgcagaaaagattcagtagtagagaagttatatatgaaaattacatatgcatgcatgtgtctaactgtctataatactaacaattggatcatgcaggttgccacatcatgtgcattagcagcacagaaattacagcgcccagttaggatgtatctaaatcgaaagacagatatgataatggccggaggaaggcatcccatgaagataacttacagtgttgggtttaggaatgatggtaaaattactgcactagaacttcagatattggtcaatgcaggaatatatgtggatgtaagtgcaattatgccaaacgctatagcttacgcacttaaaaagtacgactggggtgcactatcttttgatataaagttatgcagaacaaatcatccaagtagatctgcaatgaggggccctggggaggttcagggatcatttatagctgaagctattatagaaaatgttgcagctacacttttaatggatgtagattctgtcagaagcgttaatcttcacacacacaaaagtcttcagtcattctatgagcactatcatggtgaaccttatgagtatactttgccttcaatatggagtaagttggctgtttctgcaaactatgaccagagaaataaattggtgcaagagttcaacaggattaacatctggaagaaaaggggaatttctcgagtaccagttgtgattcaactgactctaagaccaactcctggaaaagtaagtatttttttagatgggtctgtggttgttgaagttggaggaattgaattgggtcaaggtctttggacaaaggtgaaacagatggctgcatatggtctcggtgctattcaatgtgatggaactgaaggtcttttggacaaagtacgggttgtgcaatctgatacggtgagcttgactcaaggaggcttcactgctgggagcactacatcagagtcaagctgcgaagcagttaggctttgctgtaatatcttggtagagaggctaaagcctcttaaggaaaagctgcaggaggaaatgggctctatcaagtgggagacccttattcttcaggtagctactataaataaagtaaaagagctcaattttgaacattgataaattttcctcttaaagagttatcttcatgattgttgtgggaggaagttcccagaagataaaaccagttctcttcataacatgaagcaagtggcaacttaactgttttctctctttatgatccatgtggacagactatttatgattgaatttcactactgaccactgaaaggtttacaaacttgtgtttttcaattcacattgatgcatgtatattattattagtatttgtaattgtgcatgagatgtattgcctcaagcttttcctgttaaggtcttggagtatgtagtgcggaagatggcacactggcaattagcgttctcacaatttattggttcataattactataattaggaaaatattcagggaatttcatgtgcaaatggaattggtagagaatttcttcttattttcctagcccacaagcatttatatttaatcaccatgttgctgacaatttattaacgtacaggcacacatgcaagctgtgaacttatcagcatcttcattgtatgcacccagtattaactctctgagttaccttaattatggtgctgcagtaagtgaggtaggtcggttttattttttgatttatatgcacatctcaaatcaaaatggtattttctctagttctttgataattacttctattgaatgttaattgctaatgtatattttcacacaaaccatgttactgaggtaattgagccaactttttttataccgatattctaaatattggaaattatttctcaggtggaaatagatcttctgaatggagaaaccagatttttgcaaacagatattatttatgattgtggacagagtctaaaccctgctgtggatttaggacaggtaagccaactacatatttgctaagcaagctcagcccataccaaggaataacataagagttgggtccaaaaatagtttttatttacacaacttctcacatcaagaccctctgggagtaaaaaaggacattgaactggcacactattccctatgccaaaaattaaatttaatagtaaaagtggaaaacacaataatcaactcctaattggaggtcctagaatgtttatggtctcttactacttacaactattcagttatttcagtatgaatatttatccttcttaacaatacaattgtatcctgcagattgaaggagcctttgtccaggggttaggatttttcatgcttgaagaatatgaaacaaatcttgatggtttagtgttgcaagacggcacttggaactacaaaatccctacgttagacactatacctaaacagtttaatgttcaagtcctcaacagtgggcaccaccagcaacgtgttctctcttcaaaaggtatgagcaaggaggggagttatcaaaaacctgtttgtaaaattggtcggtcttatttttattttttttctcatgaatgcacctcacttatacatgaaatgagtagttttgtgcactctgtttcattgattcattatagtttattctaacagttcaatttcaaaatctagggatgataaagacataaatatttgttaacaatatcttttgtagtggaaagtaactaattaaataatatacgagcttgggtacgagatgcatgtgatacctctggaacagaaaatttaaaaaaaaaaaaaaaaaaaaaagttccatatcaagcctggggatggaagtggatgcaacaaataatgattaattcaatttcatctgcataatagtttggtaaaataaataatcgtgtttgtaacttgaaagtactccctctcactatccctaacaaaaataattaatttagttaatcatattaaatttatcaattatttatactatcattttaaaattatattttttatttttttattcacttaattatttttcattaatatttgaagtgagaataattaagtaaaaatatgtaaaaaaataattaatgcatctaaaaattaataaatgatcttacaaaaaaggataaataaatttctgaaaatgttcttataattaaagacaaaaatagtaatttgcaataataaaaaggtatttaaaccttttatttaagactcttaataagattgagaaagcttcacttattacagtttgaaaatctcaaatgaaaaaaaaaatgatatttgttgctgcagcttctggcgagccgccattacttcttgcagcttccattcactgtgccacaagagcagctgtaaaagaagcaaggaaacagcttctttcatggagcaaccaagatgaagaagattcaacatttcagttgggggtccctgcaaccatgcctgtggtcaaggaactctgtggactggacattgtagaaagatacttgaaatgggaaatgggaaggacataatggtgctcactatcctaaataagttggaagaatgatcttattctatccaattttcattccttttggtaaaataaataagtggagtttttcttttattttatttcacataatgatcatgctagtggaatttaaaaaaaaaaaaaatatgtttacaataagaaacacaagctggttcagctgggtagtttctgcagcaaggaaaaggactagctggacacttatgttctccagttatgtataagtaaaagttaaaagtgtcttacatcttgcttgaatgctctaacatccacataagcatgctttaattattaaccaaaccgttttaagaaatgaaattgctcgttataaaaattggtatacgatttttatttggtgtgcggctgaattcattcatatcagcaattcaatttttataagataagtttttgttaaccaaattaaattaggaagtttgcagctatatattttaattaaactgcacctcttgcagttctaaaatactctctggaagatctaggtaattaataagtgctagtaaaaattcatgactgcagagcatttcgatcggcccttaagatgtttttttaaatgatttttttttagaacaaacttagtttagtaacttgacaacaatgatattaatatatctactctttttttttgttagcgacaaggttagaatctaaagtcttgtgttttttccagcacgtcatgtatcttatctcttcctttcctttctatctctttaattgtaaaatttattatagaaaagtattatgaaagtagaattcttctaattcttatattacaccttaactctaaaatgttgcaccttcgatgcccttcttgattctttttataagactttttctaaattatttactacaattcacttaataataaataataatatttaaaagagtatttcaataaacatttttaaaaatagtttatcatttctttcaggaacattatttataagaaagatatggtcagtttctaaatacaaacactgccgacagagtttcatactgtaagttgttattttgtaagtactaatttttttcaagataaaattaatccatattaatttgaatatgatgccgcatatgcatgatatgaaatataagcaatgtgtcaaatagagtaagagacacgtgtttacaagatgaatttcctccataaataatatgccaggtgcatgcatgacaccgttgtcccttgtcccataaaatgatgataggtcccataaaatgatgatagactcgtgtttcctaaaataaagggggaaagtaaaaggcacattgctttaaatttgatttgataaatgaaaaatgattggtttgtaaagtcaggacaatacaaaaaaatttcttttattatattcttaagatgaatataaaaagaataataaatggttatataaaattttagttgcatactttttattctcaggatgttttcttatcaatgattcataattttttctattaaataacttattttcacttatataaatacaataatcaataaaacattatacgactacatgaatacttttgattaaaaaagtacatactcttcttgtatttcggatttatatgaattattaagctagcatcacgagatgacttgtgtacccgctgaaacagaaagcaacatttgcaaacaaaaattgtgaatggcgagaagacatataagcatgtcactatcagcgtacaatctaacagtggacacaataaatttgtaggcaaatgttcagtagtttaataaagaggtattcaattaacagggacacaaacacaataaatttgtaacaacttaaaatgttcagtaaatttttggtttcattacattgttaattctttaaatttaaattaagcatttgtttttttagttgattttttacttaatataaaaccctcaatattttttatatttttttaacttcttacaaacatgatgtaggcatagacaaaaatgttaggatacaatcaaaattacaacatatgaaatgtttcccaaactaagggagaaaaaataaagttagtttggtattacgatcctgcggaccattgtattagatgatgcaatatcgatcgaacgtacgtaatgctacccatgaaaataaaaataaaaataaaaatgcaggatctaggagcaagtcatgagcagaaatttcaacgtaataaaataaactaaaagaaaatctgttttaattgaatgagcaaaaaatttaagcaatcatctaaacctatcatctataataaatttattgacttttaaaataattatttaaaaaataatcaaataatgatttgtaattaaatgatactacaatattaaactcatttaaatgtaaacggccggtgtaaaatgaaaaggttttaaggtttgtattttctaaactgccaaccaattataacatgtaaatttgttaatttttataaaaattatcttaaaatttatatctaacataatttataattaattgatagtttttataacagtcaataaagtatattttattaacatgttagagttcacaagaagtagtctaacaacagaatatagcagtaaatacatcatcaccaacaaattttacaagctatagtaccaccagtacaaaaagaacaattaccataagacataattaacaactacagcacaatatatcccaatccaacagagtaaagattcttacagttagattgcatgaaaactaaactttctttactatttgtgattagtacgttaatactgaaaggtaatgatatgattcacataactaatgtcagcatatgcatatatatatatatatataagaatgtagttgagaagcacaggctgtaactgtactgggaccaatcactgacagctgctctcactctccatgtgtatatagtcttgattaatttctacattaattagatagtttggaactgtgtatatagtcttgatcaatttctacatcatatatacttacttttaatttatttgaataaataataatacttaattatgtattatataaacaactaaagattattaaggagtagggataataataattttggaccaccttaaaagttttcttaaattagcatacctcactctcaaacccactttattgtctccttcctcacactccattcaacttcttcacttcacttcagtgcctagaatatactggtaacctttcctttatgcctttaactatgctccattttcatgtatattcagattgacatgttattctcttgcttcatatgcatgtcaattaaagggattaacattatatgcctattgtgaaaatatttcactatatgcaggttgaactttcaagtgttcaaatgggggcaatttcaacaccccttgtgttggttcttctattttgctgcctggtttctgtttcacaagcagaatacttgaagtacaaagacccaaaacagccactgaatgttagaatcaaggacttgctgaagcgaatgaccctggaggagaagataggccaaatggtgcagattgaacgaagtgttgccacccctcaagtgatgaagaagtacttcattggtaaattgctctcatccaaactctaaccaaatactggtgccttatatgctatgatatagtttactatgcttaatagttagtaatgttttcttttccttatctaagtgtatgatttgtataatataaggggcataacagtgtttgctattatggaggtgacatatattaaagaaatataagtgatgtgatgattgatgggcagggagtgtgctgagtgggggagggagtgttccagaaacaaaggcccctgctgagacttggatccaaatggtgaatgggatccaaaatggatctttgtctacccgccttgggattccaatgatttatggaatagatgcagttcatggccacaataatgtctacaaggcaaccatttttccccacaatgttgggctaggagttaccaggcaagtatacatgtactcaaatagtagtcatgttaacttttgatttatcactagacccttcaattaattatccttcgttaagagataaatcaaatttgactgtcaaattttattattgagactttttagatctttaaaatgaattattattattttttatctgtttgcactatctagctgcttaactgaataaatagccataattatgtaatgctgatagggatccagtgctgataaagaagattggagatgcaactgcccttgaagttagagctactggaattcaatatgtgtttgctccatgcattgcggtaattaagaaagtgttgattcttattttttctagatgacataaaagtttaacatggatctagtgtcctactatgttgatacttgatagccttattcttccacaggtctgcagagatcctagatggggacgttgctatgaaagctatagtgaagaccctaagattgttcaagcaatgactgaaattattcccggtttgcaaggagacatcagtggcaattccagaaagggggttccctttgtcgctggaaagtaagattctgggttgtaacttcacactgcaaaattaaaataaaatagctattgagttcaatgtgaatcattagattaattggtcgtccttgactttatacttccatgcacatatgttggatggtaatagtcattcagtttctgttcacttcttgtttataattgataattattaaaagatttactgcaatttatattttgtgttttttaggcaaaaccattgcattgtatttatacaatcttttacctttttttttattcttcggggatttcagtgtacaaattttgttcttttacttctgtaagttttaaaatattaaaacttgaatattgtttcaaatataaagacactatacccttgcctaaagattcagttaatgaagaaaagaacttctgcattctggaattggtagtttgatgaaagtcaatgttctccggatattttattaatacctacatgccacatgatcaatttctacttggacaatatatatttgatttattggcaaaccttattttgggagtgggataccataaccccgaatttcaaaagtctctaatatatagcgcaaggtatattaatttgtatagatgttattggagtatacatggtctagccagaaacattttatttactatgacacaggaacaaggttgcagcttgtgctaaacactatgtaggagatggtggcacaaccaagggcattaatgagaacaatactgttgtcagttataatggattgcttcgaattcacatgcctgcatatcatgactccattgtcaagggggtttcaacagtaatggtctcctactctagctggaatggccaaaagatgcatgctaatcattttcttgtcactgattacctcaagaacaaactgaagttcagggtaataaataaaacttaatttgattaattctccaataaagcaattgacgagtaattttggttatttcaattatgtgcgattttggttttctaagttttgttttttaggccaatcaagtctatttttaaaatcagaaaatggtcttccatcaaattgaagatgagtaaacatgcagcttttgatgtaccatgggtttattttttggtatctttcagggttttgtcatatcagattggctaggcattgacaggattacttctcctcctcattctaactattcatactctattcaagttggtgttggtgctggaattgatatggtaacaaaagaaagaaatattatgaattgagtgtctaaaatttaatgtaatgacttttcatttattatgagtttatgactttacattattttacagatcatggttccctttaatttcaccgaattcattgatgtcctgacttatcaagtaaagaacaatattattccagtaagtaggattgatgatgctgtgagaagaatcttaagagtaaaatttgtcatgggcctatttgagaatcctcatgctgatataagcctggtgaagcaacttggtagtgaggtatattttctgaaggatgtaatttcgaccatatctttcaaatggaaagaattattttattgatcaattattgtgtcttaaacaggagcatagacagttagcaagggaagctgtaaggaaatcacttgtgttgctaaagaatggtaaatctgctgagaagcctctgcttccccttcccaagaaagctgcaaaaatattggtggcaggaagtcatgctgacaatttgggttatcaatgtggaggatggacaattacctggcaggggcttgggggcaataatctcacagtcggtaagccaacatgcttaattttggtgtgtttaaaattaatctgaaaactacctttgtagaaatctatcaggtggcttaggagtgcgtatataaggtttacttaaactctacactattggagggactatttagtattacatgttaaaaagcatcaactctgaaccataaaggtgtgtttggttttccgttcaaaagcatgaaacaaacattgaatccaatgacaccacgtccatggattcacttgatcatgctttggaacgtgcaccaattgaaaactaatcacacactaaaacctacatgggttaacatgaaaaccactcatacacagcaacttgagatatttgatcataagttttttttgtaggatagttacaaaatatttgacaaaaaaaaaataccattttcctggcaggtacaacaatccttgatgctgtaaaacaaacaattgatcctgctactaaagttgtctacaatgaaaatcctgactccaactttgtcaagtcaaacaacttctcttatgccatagttattgtaggtgaacacccttatgcagaaacatttggtgatagtttgaacctgactataccagagccaggtccaagcaccatcaccaatgtatgtgggtctatacaatgtgtggtagttctcatcaccggccgaccagttgtgattcagccatatctatcaaaaatagacgcacttgtggctgcatggcttccagggactgaaggccaaggtgtaactgatcttctctttggtgactacggattcactggcaagttggcaagaacatggttcaagacagttgaccagctcccaatgaatgttggcgataaatattatgatcctctatttccatttggatttgggttatctacaaaccccaccaagtactaaaaccattaatgagattactcaaaggtctcacggttccttttctacaaagagactcacaattgatttacacgtgtacctttgtaataaaagcgatacagaaactccatttagcactagaaaagaagcacgctatttaaaataaaatttactctggagccttggcaattttatcttataaacttggctttctaattggtttggtaacctcagagacaactgtttaacatatattaaaaaaatctttattttttttatagaggctaatggcagccaatgatccataaaattgatcgtagttgggatcaaggtttattattgtacaatgtttctgacaccaaagcaattgaaagaggtagcggaggggtaagatcatgtagttacaaagtacacgagtttgtgaataacaagcatacaaaattaatagcaatatatagtgtactacacccaattcctcaaaaatagttcacgattttaacataaactaccactaaatgtttgctaaagtgccacatgctctaaaaggccacctttctaggaggaaccaccacattcttgtttccgggaaatgcatttcgtgatatatctaccaaagacttgaagctatagggttcatgcatagatatctctgacagaacctttctgttaagttggatattctccttcatcagcccatgcatgaagttcccatagttgacctggcaaataaaaggaaaagtttattgacaaagaaaatggaagaagaatatgtccatgaaaatataaactcaaaaataaaaggaacaatagaggtgttaaataaatgagaaaaattacagattccagagggaggttcacctaatattcaatccatttgaggctaaaatgtatcactcgcacacaccatgcattcagttcatagtcattttagtacaagaaatatagttagcttgaatccaggtgcatgttcacctaagaatccaatctttcttccaagaaagctattttgcttcaaagactcattttcactttcatggcttcttctcttatcacacatcaaacagacaaaatccatctctaaatataaaaaaattactggtttgctcatccacattctcctatgcttcttaataaagaatacaaattcacttctaccatttaccattagaagctcacatcctacttagcttataactgaaagcaatgacaagagaacaatagaagttgcttggtcttacttttgtaagataggcaacaaaaggaccttccacttttgaggataccagatacatgatatgattagggaaagggggaactcattgaaagctatttcacaaataaattatgcattaataggagaaaactaaacccaactgaagattggggaagtcagtcctgagtttccagacaatgctaaagcaaagaatctcagatttgtaggtaacatcacaacatatgagaaattttcctttggatataggaatggaactacaatgtgactatatattccccatgctccttatttaaaggagcaataatttaaatatataaagcatgggtttgctttgagagctttcaagtggagacattgccaagttagacatgcatacgaaagagttaccacaaggttgacaatcataagtcataacaattgcatcaccaagattttagcgtatgattggtttcctgttagcacaaattcataaactaacgcaaaagaaataactggttattttctaataaacatactttaggctcttactcagcagaaaaccaaataaacttggtcaacaatcaaagtttgatgaaaacaacaatagcaatattgaatttcttggtcaagtattgaattgaaaagattatggattagtgagagaagaaaaggagttagaagacataccccatgaatgcgggtgccagcattgatcctttggatccaaagggatcgcatgtctctctttttgttacggcggtctctgtaggaatattgcaaggccttctcaaccctctcccttgctatccttatgcaattcttggctctacccctgaacccctttgctagcttgaagatcttatccttgttcattttctcctctttgttctttctactctgcaaaacacagtttcaccaaatcacaaaccaagggtgaagtaaaagaaaatcaccaccccctattatcattcatcagacattgctctataaccatgcccaccccaagcaaagacacaaaaattgcacgaagataaagcatatgttctctcccacataaaaggaaaatatcaattatcactgttttactatacattatttcatgatagacaggcgataattaacaaaaagtgctctcagtatctcactttataccaattttcagtttcttccctactgttttgctacagttcaaacttcaaaggactagtcaagactcagaaaacaacacataaataaatcagccctatatgtaagccaccactgccaggctcccaacaataagcacaacacacaaggaagcatgatttattaaaaataattaaaaggaaaacaatgtataaactgattattaaacatctccttatccaataacccagcaaaaaataaataaaaatacgttagaaagcaattcgtactctacaaacaaatcttcacatgatgtgcatagcaatacgcatgataactcaaactattgaattaacataagaaaattgggtgaattggaaacagacttcttagttcctagcaacgcaaacgggtgaaaccaataaggagagggaattgaagtgacccaatgacccctatgcacaaaatccaaacttgaatccaaagggtaacagtggctggttccgggcacgcaaaaacacagaaccagctaacgtaaacacgattcacacaactcaggcattttatcaaacacgtaaaatgaagtcagtgtgatgggctatcatgcatggcagataattattgagacaagattaagtgtctgtgtatagaagcatacctgtgaaatgaagagaacgaaaggttttagatttcaagaattttaacgtgcgatcaccacagatacggtgcttccggctaaacggcgcctaactggtgttgtggtacgctgttgggcttagcctttttggaagattgtttggttagctattattggtactagtactattttttttattttaaaaaaaaaacaggaaataatagatagagagaaatttaatttttaattaattaaattttctaatttattattaaatattttattttatttttgacaaaactattaaatcttttattaaaatttaatcattttaactttttattgtttaaaattaaatttcaataagataagagtgatagaaaatttgtctattatatatgtgatatggtagaaaatttgtccattataatatgtgacactcaaaaaattttaactgacgtgagaaattcttaaaagcatatctatatattttgttgatatggacttgggttcgctatattctctcatgacgaaatatatttctagtttctatgtcgaaatataaaagaaggttaaactaaaacaaaacaatgggttttctaattttcattacattttttattttcttttggattataaagttcttttatctaggattcaaaatggttcattgaatcacgattcacttatataactattgcaacttgcaactattgaataataaatcaacgattatttcttttggaaattaagaatttagaactagttatcgtgattatgataaaattctaatagaaatatttattagccatgtgaggcatgttccagaaatacattaattaaattttgttaattatatattatttaactaataatttacttgaccctgaaaaatttccacgcatatccaccaatatctttacataagcaataattaatagtaaaaagttaactgattaaattaaattatttatttattaatcagctataggttaactaaggatgcaaataaataacatttttaaactatatatatatatatatatatatatataattttctgaaagattttttttttcttttctaaagtcttctatatccaaaaaccatattaaacctaaataaatttcagtcaagttgtatttttacatttaaagagataaagtcctcatgatacttttttggtataaactataaaatggaaaataacaaatctaaaacactacacaaagtgattacatttgtacaatgagggggactagatcatttttcaactttgaaaacatatctgaccaagctttttggttactccaagactgaggttggcatcacaccagtcactacacatcagataaatagtaggttgaagaatttgaatgaactaggttctgcaatctctacgtcacaatcttcgaagagtcccagagttgactaatttcagttcagaccatgtgattcagaagcacctaacaacacataaaaaataccacttcaaaaattataaccaactgaccaagtatatcattagaaaatgtgtatgatcattgggtcatttaaacaattgcccaaaaaagttatacctatgatgctcagaaaaatcttgtaacttctctatgaaaagcatgcaacaattatactttaacttctatctacagagtcgcaaaattttgcactagcccaagttagttaataagagaaggaaaaactccaaatacgagtaggaatcatcacaaccataaagtatcatataaattataacattgaccttattcagcagcattgtgcgtctggtcatgctcaataaattccagagcatcttccttggatacaacattaacacggctgaccctgtttttatgtgttactccatatatcttatcagcaactttcactagctctgggcggaatgttgttgtaataaattgagtgtttgctatgtcagccaagcgacgaatcatatctatggaagatcaagaattccaaaagggacaatggtataataggaaatctagatatcattcagaaagaatatcacaagcatgaattaatttttaaatttaaatctcaccaaaaactcgtacaaccataacataacaacaacaaaagccttgtctcattgagaccaccaaaacggagagaacagagactaaatattatattgacttgatatgaaatataactgatgatattgttcataaaacctaaagcacaaacccttatctatactaatcaaattaataatcctaaataaataggaaaaatatcatgggataaggaagtggaaaccaatgtttacagagaataagaagatgggaaaactaaccttaatggataatctaagtaatggataatcaagatataataacattagatgttttcaaaataatctacgagatgtaaaagagattgtacggagtataatggaatggaataatattaggttttattgtttggataggataggatacaatgaaatggaatctaatggactgcattccatctgtccctaataccgccttcttttcctcccctccaatttgaggggtatgggacggaaccacatttttttcccaattcatcataaaaatatccaaacaatccatttcattgcagcccatcccattctattccacacagttttgagttgagtcattaagtgataggtacataatagcaggtatgttttcaatgattgaagactcaccatatataacatcaacctaaacctctactacctccaatatgcacaataaaatttcatttaatggaagatgaggtgtgcagtaaatagagatggaagaattgcacaggaccagacatttgacataatatgtagcaagcataaaaaggatacttccaacagcagttctgtactgtggatccagcgctgcatcgatctcatcaaatagataaaagggagccggatcacatcgctgtatggcaaagataagtgtaagggcgacaacagttttttgacccccagacaactgcttcatggactgtgtctccccttgtccagtaaatgagacctgcaagccataaacatgtccagaaatgtcagaacttagatgctatgttatgtacttgtaatatagtagaaataacaataaccaattttttgaagcaatgctggggaaactgcagtaaaggaccagtgaatgacacagctattttaatgcagtttgtgttgttacatgatataaagttttgcttttgattggttgcattacgtaagtctaaataaaaaccagaaagaaaagaaaggaaaatatctccagatatgaaggaaaatatctcctaccccacactattatctgactcttttaacgtacaaaacaaaccctcaagcattccgaaacaaacaacaatagcctcatcccaacaggtgtagttaacaaaccctcgagcattctggcagaaactttacattaaaattaaaaataaaaataaaggcataaaaagaatacacttgccttcactttcactccaatgtacttttctactctcccctctggatttgcttcacgaggaccatcctcatcttcgtcgtcatcatgatcaccatcctgagggaaaggaaatacaatacagaaataccactttcatatcaattacaatgactaaaaaaactttttgctggagattcctcgcacctttttagcaaaatacaaagaaataaagcagtaattaagcaccacattcaaacaagagaatggaatcaataggacatgaaaacattaagaaaataatgtccacttaaaactattttaaaatgtgaaaccaagataacaagttataaacattttttctcattcaaaaaaagaactgaatagaaacgtgataagaaccttgggagaaccacaccacaaaagctagctattgtagttggagagcccaaggccttataaaccccacaccagaatcacatgtttccaatgtgggactccaagtctcatacgtagcaattgaatcctaacaataagtcaagaatgatcacaaaccttctttttcatcataaccagatgaccatgccccccctgcacaagttcggaaaatacttcccgaaaatgcctagcaacacctttgaaagtgcgttctattgactcgtccttccgttgatctagcactgatatcagctccttaattttctgtaattattcaatacaataagtcaaatagatggcaatgtaggatacattagttgcattggaatcagtccaacttgcaaaatcaagcttgaacccaaatcagacataagcattcctaggttattccacatataggggattggttaacaagacctactaaagaggcacataaaaagcaactttcagagccatgacagatcagttgcactaaaacatttagatagtaaagtgcagaactaacaatataagctaagcagtgtagtccttaaagacttttgattctttggggaataaagggcattccaaatgaaaatccctgcaaagtacctcatctcctgcatcaagttcagcctgtcttttctgaagttcttctcgttgttctgtaaaatttatatactggtcaagtgctttcttgtttacatgactgaattgctgcaattgctcgttgcacctgtgcagcattttgtgcaaatctttaatattccttcgtctatacctggcatttgcaatgagtaaaggaaaggaattaaataaagttagctaaaaacaaagtacagagaaaatgataaattgcaatgctgcgagctatacactgtaatagcaccatatctggcggatcatcaaacatatcatggcacagtaatcaagtttacccccaaaaaagactaaatacctaatattaatttaaaaaaaatagccgaaataataaaacattccaaaattgttggagataggattattttcctgttcatatgcttggacacatgctttgtctgaatggatgcaggagttagccatgccatatttaatgacaaaggagtgagaacaaatgtgttcaatgaaaatgtatcattgcagaagtttggaatatctgacgagtacaaggcttagttaagaaggtgacaatatcaaatagattgtggaagaaaattgtcacttttcctttgctaatagaaatggagtcctttaatgcttttcatagcatatttcagttttcttttcatatccctctaaaataattcatctaatgcacacacaaaaaaaatggtgaaagaaagacttacgcctcaaaagcatctgatgtcaatggccccagttcccttattttcttggcatattcctcttctttagcagcatatgtattttttttactctgcaattgctctaattcttttgcatcttcctgaagtttcctttcatactcgtcctccaaatactacagccaaaagctttcatcattgttgggagcaataatacatatacccgtgagcaatttataaggtcattattaccttcaatttattcaattcatctttgatctttttaatttgccgtgttcggtcatttatactttcagtcacacctggggaagaatatttggttaaacaaggaaatatattcaagatatagataaaagactagattgattgaaaatttgaaggtctcacttctaagctgccctgttgcatcatcgaccaatattttagcatcactaagttcctgccgttttgattcagcatcagcaaccaaagagtcagcatccgcagatgatattacagcctccaactcttgtttccttctcctaaggttagtggttagattggtatcaagctctgctctccgtgcttcagtctgcaaaattttaagccagaataagaacaccaactttatgaagattatgagcaccaatacaattgattgaataacctcaatacgatcagtcttgcaagcaacaagcttctctttaaggtctttgatttcagggttcagatctgacaaaagctttttttcctctggtgttaaatgatcaatgagctcagtgcccatctcagctttcttcatagcgatactagcattaagctgttcaatttgattctggacatccccaacagacttctcctacaagtaattacggaaaatggtattaaaaaagtagtgaaaaactccacaagcaactaccaaccaaaagtagctccctggggataattaagtataagtgagaaattcaataacaccttttttgtaagtgctttagaaatcaacagcttctgcttattagcattcgcaatatcctgcttaagctgttcaatcacagatttgtcatgagcacatttggcatcaatcttctgctgttcagcaacaatttcattaatcttttggtctgtctgtaagactaattcagtgaaaacaaccattggaggaatagcttaggcatcaaagaagtcattcacaaaaacagagaaatatatgacatttcatgttgtcaggtcaataacaaattgaggctctcttacaagacttttagcataagataaagcaaataaatcatccaaagaaaaaccaatcatcatcaataaataaacaaatgcaagaaaaaataataaagaagtccctcgataatagagtccaaaagaaccactggacttcagtattatggaacaattacatgctataacacaaaagttttatcctcaataaaacctaggtagaacatcttattatctttaacttcaacttgacacatttctaataaaacaattttatgaagcagtgcacctttactcattataagtttaaaacattcttttaaggcatcaacaagaatatgccccgagaaacaagaaaaagtagccagcacactagtaaaattagagaggtaaagttgcaattaatcgaagaaatatcaaatatgcattataacaaaaagtgaacacatctaaagtttcctttatcctcactcttggagctattttcttccaacaagcagatcatctggattttctttcctttatttcctcattttttatatgcattttataatgagtttttgcctaagagaaatgaaaactacaaaaagaatattcatttattaacataaaggatatcttgtagattaaatctaactttctccaattcctcctctctaatgtgaatagtgtctgcattctgcttaatgatattcataaacctcaatcttgatcgtctgtgatcataaaatcctccagtcatactgcctttcttgcttacttgatcacctgtaataagtcaaacaatttgtcaggcaaaaacacaagaccagcccagatcaagtagacagacaatgaaaagaactaggccaaccatccagcgttatgcagtccagaccatcagaacgagcaacccttgaagccacatccaaattcttgcagataactgttctagcaaagacctatgaaatatcacaagttaagggacatcaaatgcaactaaataattaatatttaataatatactatcacctaattatttttactacattagcatatgcaaatgtaaatctaagattccaacttgaaacaaagaagcagaacaacattaccttctaagaaaatcccattcaatgagtctcacaaaataattttctataaaggttttcaactgaaatgtcttgtctatctcataagcacaagtctaatttactcagccaaccttttgcacaaactaaagcatcaacgaaagacataatagattcgccatcaaatcaacggcaaacatcttatttactaaaacattaaaaataaattaaaaatttccattttctacatatagttgattcctcattattaatttccatcttatttaatatatatttcttattattatattattcagaatttattattattagtatttagctaattgtattatatattatgttttatttagttttataacaattattagttagttgattatgttttttattactgcaatttttaatttattatcatatgttacgctttattaagtttattatattatgtgctatgctctaaatagtttttatttttttaatagtattataatttttattattattatttagtttattatattatagcaaagattatcaccagataacaagttaaaaacccacccttgtgaaattacatggcagagaaatgttggacttgaggcccgaggcccaacagattagaaaaaaagaagaagaaaaaacatcctaaaaccctaaggacctgacccatcactaaccatgttctttgttagctcatgcagccactgtgaaaatgaatagtccctgttagagaacgcaaatggaagagtgggtggtcggcgacggcacaagggaggtcacagagtatccagcatggcggatttcacttgggcttcatagtcagaagcacgaccgcagccactccaaccgcaactctaaaacgcaacatgaaggaagtctacatcacacgtcactgtcgctctgctgcgatagtggccactccggccactattgacagctatgttaattactgtgtttacattgaaaattttctagtgaactcctgtgcgaaatttgaatttgaacataacacagatctccccccttgttttgaaatatacacattacacagtaataccttcaatttcaaatcttcatccctatatagatggagtgtatgaatctagtaaatatcccaacaggatgtttatctagtgagaatctataacacgggaagagacgagtctaattgaagcaaaatcaggatcagtacaaacaacctgaagcaggttcataggtaataaggcctgcccactagatccttgtgctgtgttacagtagtttagaaactgttaaggaagagagaaaacaagaaacatgaattctgtgtctaatttacacagcggaggctcttattcgtaatgtctacatgagtcataaatgcaatgaataatggttttcttgtttctcaagaataggggagatctctaaaataagagaaaatgttaaacttttgataaaaacatgataataagccctacacaataaataataatcctttaataccatgattattataaattaacatgcttctccattatgcatcaatttttcatgttaagttgatatctgatagaccaaaacctcggaattattttattaccaatagcacataaagatgttgttgtacccatgtgaaataaaagataacatttgtttagaagctaacctgactgaatgcgggagtatagtcatgtttaaaattcaatttctttaaaagaggtatgacatccgaactctgtggataagtgatacgtggagcctttactctgttaagtggaataaatgtaactcgaccacctttctgtgaattaagatgtctaattatctgggttgacttgtcatcattttcaacaaccacatgaaataagctgttcaaacaaaagatgttaaataaaaacattaagccaaatgtaaaaatataaaaccagtaaagaaatcaggccaagaacaaagactaaaaataacaagatggaacaaccgatgtgccaaattctcctgcccctcccccaaaacaatataggaaactgatcaatgcaacatgtgatgaaatcaatatgttaaaagaaatatcagagatgacctgtttgctgcagtaacttcaacagcagtgaaaaacttttcatcacaattcagcaactcaataattggaccatgaactccagaaatgttatactccctgcagatcttcctaactgaattcaaccctcttctcacatcctgaacatcataatagtgtcaaacatggtgatagataaaaacaaaacctgtcccaagaatgataataatattatagaaacatcatggcagttaaccctcaaactcaacagataaacagcagcataagatctaagtatccatgactcatactattttggataataattttaatccccacccttacccattggggtatctaggtacccatacttaccaaaattataattaactacaactaaaaagtcaaaaaaatattgattaaaaatacaactgtaattcaattaaaatactattcaaagattttttataaaagattacaaacataattataaaatattaccgtaaacttccacaataacaaatttataaacattcaagtccaatgtggagcaggcgatcatacacctccaatgcagcaatccatgaaacttgttgggtagtatcagttacaacttgcaatacacatcatgcgatcataaagggagttggggcttgagtgcaacgtaaaagaaattaaaaggtctactaaaaaaaaaaaaaaactacgtatcaaattgtccagaggttccttgctatgtgaaggtaagggggagggatattatacgcagtcttaccctagcatatgcaaagaggctgtttccggattcaaactcatgaccaacaagtcaccaagacacaactttaccgttgtaccaaggtattagtttcaataaatttcattttttgttaatttattattatatcataactctctctccgtacctgtgcccaatgttatcaaacttgggctggtcatcgactcggtctagatactaggtcattgagtcacgaatcgacacagtcaatcactaattgacttgtatgacccagtgaagttaacaaatataaacataaatgtatgagtagcaaatataaaatcaaattcaatgaagttaacaaatgatcacttttagtaatgtaatgtaataacttataaagattatcaacatcaacaacacctctaacccaagctaattgggattggtagtagatgaatcgaatgatagatacaaggaggttaaaaaaaaaaagtaaaagcaaagaaggggaaaagaaggaggggggaaatgaagagggaaagaactaaaaaaggaccatatgcaacatagagataacaacgggtctaaccctccaccaaacttataacttttctccattccgtccgaagcacaccgtctgtcaatctatatcttattccattaagtattgcttaagtacctttctccaggtaagtttcggtctatttatacctctctttgagtcgagcttttggtaacaaacttttctttatatatttatcatatcttctatcatatcaatattattatcataaatttattcatgataatgtatttaccaattcaggatgtgttaagaactatctcattttaatttatgatataataactcatttaccaattcaaaaattaaaagtacttccaccaccaaacaaaatcattttatatcttctatcattttaagtgtaatacaatttctggaattaaagtgtttctgcaatctccttcatctatatactgcatagaaaaatgtaaaaaccctcaggccatagtcaaaatcatccacattcttttagagtgacaccaatttacaaatatgatggcactttgtgttaattcacatcaggtagaatataagttgcaataaaattctaaactaaacatgcccagactaccccgtacatagtgaaagattcaatgcctagaaacaccgtgttgaggattcttgacaatttaatggcatttacaaaaggagatgttagaagttagaaagaggaattacttacaccaggaattgcatgatcaagactcttttcagccttctcaacttcagctctcagcttatcaatttcagcagtaagttcattctctttgccccatagggacctataatgtagcaatttaaactcataagaaatattttcttgaccagggaaagtaataaataatatacttttgcagtttactatgtttctcctttctacttttgctaaggagggcaccccatcctacactttcggtgtacacattcttcactgtaacaatatttcttcttcatctagtaaacgtctacatagaacttttaaaaaaaaagagacaaaagaggagttacatactttctctccccatgtaacttgtctctctcttctttgtaatgattaagcccttcacgtgactgagcaatgagagattccaaagtagtaatttctgatttacgtctgtttatattctcatcacaatcctgcagttcttctttaagccgatcaatttcatccaaaagcttttgctcctgcagaccaaaacaacaatcaaaaacaaggaagagagcatagtacaagagaccattgttcctataacaggagaatacaaagacagattaacagtttgcaaatattggaacccatggcaagggtcactgatcacatgaaagttctatactcaaagaatactcatatatcaatgttaataagttgagtaccatatggcttaataatagttaaggtctacgtctttacgaacatatgggattcaagtaaaatgtaaatatgtaaatataacccagttcattttaaaataagcagcatagaaagttccattcagctgagtccgagattgtttagtaacaggtttctccttattcaaagagcgagcaaaaaaactcaagtgtcaggtaaaattctcacggactcttaaaaattggtagtacttttagagagcagttttttgttttcataggagaagtagacttcaaaatcacaagttagctggcttccaccttttgcttttaaaaattaaaacaccaccaaaacattctcacgattttttgagatatcattataccatttattcattagagcataaaccttagcttctacaagcagcttccacaaatcaacagcaagaccaaattgagctagagtatttggaaagaagccaattagaaatgaagcatagataatgaagaaatgtataaaaaggaaataatccaacttgaataaaagtagagtatgtgccaattctgagagaaaaactgtcttctcatcatgttgctcgacatcacacaacaagaatattttatgagttctctaataggaaatgcagtgagaatgacaagcttagatgatattgtttgtagtggcaatcacacattttgtttcttcgatggggaaaccatatcctctgatattgtacttctttcattctattttctaataacacactgaatgtttaggaatgactattttcccagaaataatcacttttattttccaaaatctaccttaggaagttgacaaaagtaagtgatcatttctcccagttagacacgcacttgatctggtaggcataaaaacgtgggaaaaaaatgcatatacaagttacaacagagtagaaagatgattttgttatcacatttaaaattaatggaacacaggattaaagaaaagcagacatcttcatgccatgaatctgttcaaagagatatttaggacataattcattatagctctacagataaatgaacacttgcctgccccttgtttgaagaatgcactcgttcaagatcatcaatctccttttgaagccacttatcacgagaagctttacttgaaaactgggttgcacgtccttgtttttgataaagtatactgagtttcttctcacgttccattattctaacaattaatttattgtgggagaaatactaataagaatctgttgaatatcctcaacaaatgatagaataaatttcaaaaacagtacaaacaagtgaaaggttaacatatacatatatatatatatatataactatcctacatcctgactaatccaaatttatagctagatgagaaacactaaaaaattaagattaaccagttataagagtgcagtaaaaaacataaccaccatgtcagaaagtttgaatacataaactgggagagttagatacagtacactaattgaagcatattgaaagacaagtatatccataacctactgcttggcaatgtctttttctttctgaacttgatcttcatgtaaaggaataattttgcccagttcagcagttgaatcttgaatttctctctcaagtatctccagttgtcttgcagcatcttcctgaaagcatgtaggtaaaagatgagccatgtacaaaaccattccaacaaaataactcataagatgaattcttcaaattagtactttggctcgggtatttccagagatcttctcttgcaagtctttgacatcaagctcaagctctgtgtgcttctttaatgccactgttcgtcgcttttcaataacctctttctctttgttaaagttttgaagttctttcgatacatcttttaatgtattctctaaatctttggatttctcatgtgcatcaagaacatcattatacttcctcgctgatgtgtcagaaaccttggtccgagcatcttcaatctaaaacaaggtgataagcattcaacttcatgcatcacaaacccaatatataacgacaatgggattaaaaatgtctgaacaaatatatatttgacattcaatattatgattgatcaacaaagaaattaaagtgtacaattataaactccaaataattgcatcgagtatatgacaggccttttatccacatttatagcaagaaaagaggagttaagggtatcgagttgattacaaatggaccacggggtccaatggagactcggtcagaagagagaaagaggggagtagcacacgggagagcagttgggtaacgcagtgcaacagtgacactattgagcgtgatttagtaatatggttcagcacatgaggaatttcaatttctaaacagaaaaaggtttaaaacttctactgatttatgcagtgttggatatcaactaaaacggaatgaaaataaagagaaacgaccgtttcaccttaaatgtgttctagaattagctattaaattgtaaaagggggggcatattttgttttttattgtccttcaacaaattatattatacagcttttgaagtttttcatgaaaactgagtacactcacatcacagacaattgaatcaaaccaaaccagaatattaattgaaaacatctgtgaggtactcataagaatttatttaaactttcattgtcttaactccagtgatatagctgtgattttgaaccacacagcaaggttaagaaccaaaagaatatatcatcaccaaaacgattgtgactaactacccaatcatcaagaagtaaatccaactaataaaacacagtaggaaatcatgcaaataattatagaagagagaaacatttatcacatataacctctgtaagtttttgctgagcttcttgaacttctttgctataaatagcatattccaaggattttctttgcttgtcaagctgctgatattttctaagttcctccttctcctcatctagttccttcaacctttcatctaaatactgtacaacttggattatttgctttcttttattacctgtctaacagaaaaatgcatgacaataacaacatcaataacaagaataataaacactagaatctgtactgatgtgatgcatgaatttatgaaatataaaatattttatttcatattattaatcattcactaataaagataatattaagttattttttaaaatatatattttagtaaatagagtattataaaatacaaaatactaaactactatttagtacctttaaaatttacttgatattaaattagttattaaaaattttacaatatcaaattagtctcccaaataaccaaaaaaataattattttatctaattattaaaaatcaaaatatttttaatgccttttaatgcttgatggatggagttgatagcacaaatatttagaggattaaattaatattaagcaaatattagaaggagaaattaatatttaaatctttgaaataaagttaaagtattaaaatcaagtttataaagtttgtttatacttattgatagagagagaggcttattagaagtacacactaattttcagtataaaaaaacttattataatttcaatttcatacaaagaaaatttaaaagtaagaatttgaaggaaaataagtttccttttgatctcatccagtcataaacttaaaactatttttaacaacttttaaatttaaaattaaggaaaatatttattttaatgtaaatcaacatgtttgataactagaagcaacacgaggtgaagacttatccattaatggacaccttgtctactgtaagcaagaagtactcgtccagtccatccaaaaaccaattgagataagaatgctacttggatgttcttagatttaggggaagtctaagggttgtaccaatagtgaccttgagaatacttgtaagctagaagtgacataaaagaatacttgttgtaatcaagttttattagtggaaccctttactggttggtagaggaaaatttggacgtaccccagattgaatgaacaaatataaaacgaagtatttttactactcttctttaactaatcaaagcatttcaaagtctattattgacacattttgcacacaaaattttcacggaaaaataagttttatacatcatttgacgataacccactctcaatcactggacgagggttcttaaaaacttgtttatcacaacatcttccttttcaaaaatgtcttatattttgactaacactattcaatttccattatagtgtaatttattgtatttcaacactatccatatcaagatgaagtatttaatagcactttttaactcaatgtatacaaatataaacaaattttaagtattattaataaaaattataaaaactaaattaaataaatatttttcaaatattatttttgttttaagacttgcaagtataaattatagctaagtaaaaaaagtaccaatacacattatgtttatgtatgtatttatgtatgtatgtatatatatacacgtgtgtgtaatatttactaaaaataataatatgcttcttattgttctttgtttgaaattttaaaacaataaaaaaacaatgtaaaaggttgaaaacataaaaagtcaagaaacaaataaagttaataaaaaataagtgacgtaataaattaaaagaacttaaagagaaaatatcatgcggtaactttagtagaagaactttagtattatatgtagattacaaataatgaatttaaatgaataacaaataaataggaaatactagataaatcatgaacttaaaaataaataaatcataaacttgccagtttcatgcattattttcaaactttcacgacgtctctcctcataaactctagtaccacctatttccttcagcaagtcaagtcgttcagagtctttcatcaaggttagtgatgctatctgtgcaatagtaaaaatgaaacaggtttagaaattagattcaaagtttataaatataacaatagtaaatccaaaaccaagttaaagcactgtcaccatcagccaatacctttccttgttgtacaacataataaggatttgaccgggagaacccagcactctccagcaaattcatcacttcagtttttctgcaggttgtacatgatctttaggaacaaggtaaatactcatacaaccaaacagcatacaataaaataagacatttttttctgaagtgaaaaataaatgcaaagtatatgctctaacatgtaattctatttcactcacgttatgtgctttccatctagaaaatactcatcctttttgaaacctatagtccggcgcaagcgcacttcctccttgtcaacctattcaccaagacagatagtgcatagttaagaatttcatgcataagtgattttcaaacatatagcaattttgttgtcataaagaaagtacaaagaaatcaattatgaagacatgcaattattaattacatcaacaagcatcaataacaagatttttctttcggcataaaatagttttataaaaattgaaattgtatggtagaagttcagtgaaatcaaaacaatgcaaagcacttcatcattaatcaaattatttaccagctagcagaaacttcgcaccatcagaatctcaatgccaaagactttcaaaaatggaatgaaaagatgtttatccaacatagagaacaaacaagttaaaaatggcattgagtgaaaagaggaaaaaacattatacaaatctagatattaagtcttcattcagttaaatacaaaatttatctgttattatattcttttctttgcctacaaactcatttctgtaagcagcatgatcacaatatgcattcattgcacaagaatggataaatatccaaccattgaccagtcaaaaaggtaccatagattaaaaatggcaaaaaaggtgactgttttgtagaatccaattcatgtgcatatgccctataacagcttttagacaatctatcctttcactgagaactgagaaagataagtgccaaaaaagtcccatttttgtcaccatttaggatacactttatgaacaaaaaaagataaatagcatttcgttttaataacagtgaatagcgaatagaagaaaaattattatcctcaacatattaccgggatacgattgtctgaattatcaaacacaatctccacaaacgcagataaaacctgatgtccagctccttcctgtgcaaagaataatttatttaagcatattcaaattctataactgattagttataggtaagaaccagaaataaatggatgaacagtgccatacatggagtagtgcctgcctatcttcaccgcgtaggttttgaaagagatcacttaacacaaaacggatggctgcaaaagaaaagggtgtaccaattgaaggtcagagatatgatttcagttacttccgaagactaatggcagtcagtaaataaagttgatacgaagaagatatggtgatttcttaccatggaaaaagtttgtctttccagatccattagcaccaactgaaaaaataaataattgaatagatattattaaagttacaaacaaatacaattcagatgcattcatcatttgatctaaataaaaagatcgaaattcatctttagaaacaacttaacattaaatgaaatgtaattaagagaaaggaagaatgcattagagtgaaaacaaggaaaaaaggaagcaatcaaactgaagacaatgtagtgagtaaagaatgcagatctgccaaaaaaaaaaagtatgcagcctttagcttgatgtgagaacaaaacctatcagcatagcaatcaagcaggatgagatcataccatggttttcagtttcacagtaaaattcttctgtgtctccttaactgttctttttatggacattaatggaactgaaaaggtgactttcaagttccaaggcaaagtctttcatttggattttgaataacaataatcaatagaattaataaatatggtttactccgaacaacaatcttaatgaagcactttcttagttatccattaatctttactagactagcaagcatatcctacatagttcagatgatggacctatatatagctatttaaaggttttgaaaagataagtagggtactactctatggaaatgtgtagaatgtagatattgcagttaattggtgttatggtaggagatcaatggcaggattttcaagaatatatgtatgtagtctatgcaaatatatctgaattcaaataaaaattgactaaacaacttattctacattgcctcaacttcatgctttgtttagctgccatcataacatgtcatgaatgaaatacccacatcacgcatgcatttcaaaggattttccagtatcaatataagaaagcatctaaaagcttttcagtaaaattattaccaacacaattaactttagaactgaaaggttcagtggcaatttgctctcgataactcttaaaaccttcaatcacaacctaaaagcacacaaaacaagtacattaaaaaaaatggcaaagaaccaactccaaaatccaaaaccgaaataacagcatattatatggtgtttgaaagagagaaagtgtttatgaatcataatacataaacacaatctagccagatctaataatttaggacacggcagaaattaacaagattaaattaattaaataaataaataaataactccaaagtgtaattacctgcttgatgtacatgttgaaagtatcataaccgtacctataagagccaaaaaaaaaaaaaaaaaatccatacgaatgaacgcattagaaacacaacacagagtattgtacatgctatctcaagtttcagcaatagtgtatttgtaaaacataagacaaggtactatcacaacagaattcaaaaattcaaaaataaatacagttgagcatatccagaggaagttactttagctattgcaaagtcagagatgaaaaaaccggattccctaagcagtttcagtttcaaaaacagtctaataaacaaggcaatttggatttcaaaccataaaacacactatagctatgaaatttctaggtcacattcgggatatgaagagtgtcttaacgttttctgctgagaatcaagtatgagaacaggaaatccaggtaaaaccaatctcgtagatagtgttagggtttcaaacgaatttcaaaaacactgagagggaaaagagaaattgcagagcgaagatgaaagagaagcagaaacatgtgaagaatatacagaagttgatgggagtagctagagagtacctcagagaaagttcagtgacaatggagtagcaaagttgaagttggagcgttctgtttttcgtttaatgggtttcggggtgcgaaggataagccgtgcgctacggggggtggattttagtaccacttggttcgagcggacgtggagggaatgaaaaaaaaaaaaaaaaaaacattacaataaacgcggcaaagttttgagaaaaagatttttctttttttttttttttttacgcatcagtgttggattttgcgctagacattagggaaaaaattccacgaatttcaaaaaataaaaaaattcgtagcactgtgctccccttggcaggatgcactaattattaaaaagtttgatgaggagatggatagaaataaagttatgaaggaggaggaactatgaatgatatttgatggttatctatcagttgaaacatggtctccttttttctttttcatcaaaagtaaaaattatggaaaatattgttcgagtaaggtttccaagtttaaatcttttcttttgtaacgactaacgaatgtattttacttgctctagtagttggagtgagaaagccaattaaagtttatgttaattctattgatgttatacgtgggaggtttgcttatgtctgtgtagagattgacttaattgtttcagtggtagacaaggtgtgactgcaaatccacttatacaagattgaatatgaaggattgcacagaatatgctataattattgatgctatggacatttctccaaagattgcaaagtttcatcataggaaattcctcctccaccttcttctgctgatgctaattcctcttccatggtgggagtacattacattcctaggcaactagcgtcgaaaaccttagtcgaggaagcaattacaccagtcggtaccacacaggggaacaatagagttaattccatggttaatgttgtaatggattctttgatggtgactggatatttgtgcaacgtaaaaaaaatggatccaacatacagtaagagaagggatcctaaaacaccaagaaaaaacattaattaacatcatataaaagtgagaaaaaccaaaatcagtaaagacccactcccaaaaggtttactacatataaaggccaatcattttaagtgttggattcaaggcacacacaaagtcaaataattttttttaattcggtaatggtgcaacgtctacaaagaatatgaagccagattcaaatgtgcactatacaatgacacatgatgatcttattactgataatgaccttcataataaaatgttacttgtgtgtgtgagtgagagaaaaaatctgaaacgtcgaaaggtgcattttatcttctgggtgtgattatacgcaattttatgtttttttcctaaaagggggcaatttttttatttactaattggggaaaagttttaaaaaaatcggattggggataaatcacgccaagtgtcacgaatttttttttaaaaaataaaaataaaaattggtcgttaaagtttagttgctaattaacgtggctacttccgtctctaacattttttgcgacaaaattattgtagttgaaaacataaaaaacaaaaaaatcacaatattctgtcacaaaaaatattagcaatcaattttattttttttaaaaaaaagtcgtgacacgtggcacgacttctaagtcagaagtcgtactacgttacacaacttacccccaatctggaattttttaaaaacttgctcctaattggtaaataaaaaaaaatgccccctaaaggagaaaaggcccaattttcttgtttatgtctgcacctgcccaatggtattcgtattaatatgaattttcctttattctaactgagatatgtgtacattcgtctgaaaaatctattttgaggtcgattagtgcctttcaccaccaagttataatttcttgctcacttttttctctcgaattttgaagaaaaaaatcatcttccattgttgctagagtttgcaaaacgaatcgactcaactatcttgcaaataacactggactctaaataagatggtttaaataaaaaagcctttttaactccactcacttaatgagtcaattaggctttataaactttagatttactcgatgactaacataaatataaaattaaattaaagatatagtataagaaaacaacataaaaaatattattttggtaaaaaataatatattattatttaatattaagttaattaaaataacattaaaagttcatttgattcattaaaaattatgggtgttccatatttgatttgaaaaaggattagaaaataacacaaatcaaatagatgaggatgacattaaatatctaattattttaagagaaaaaatatctatattttgttactcataaaattatacagatataaaatattaaaaaaagattatagctctatttttatctatttaataataaaaacaataattaactaacgaaattaattagaaaaacataaaatcttatttatttcaatccctctatctttattttaataattatataaattacattaagattattaatattaaatattttaatatattttattttatttatttatatatttcgtcaaataatatataagagagaaaaaaaattatactgtaatttatgtatttatccgtgtgcattgttctttttgatctgtgtaatatcataattttaaggaatcaaatcaacctaacataaagtgtgggataagttttaacttacgcaccctcgtacaggcggcacagcttcgtcccccgttccttttctcactggcaaccctaacctaaagtctccggtgcgcacagctgctctgccgtgactctgtggtcgacggtataaagtatatgccaaactattgttaatttctcttcctctttactccatcattgatcaatctatcatatgtgaaattttattttaccaaatatggtggttgtggttctgaatgaaatcagattatatgattggcatttatgaaaaagttgaatggtctaatgccgatcaaatttccgagctaattcctgtttctgcattttcatcagattgtgttgttatgcattgttgcagatgaaggtgaaaaagcagaagaggcacaggaagattttgacgttttacactgcttgcttcggttttcggaagccttacaaggttctatgtgatggcacatttgtgcatcaccttcttgtgaatcgaataacccctgctgacacggccattggcaatgtcctcagtgctacggtcaagctgtacacaacaaggtcctttttttccccctctctatgtttaaagtagatttattaacatttttttcttagttcaacatcgttggtatgaactatgaattgtgatttgttttgttttggataccttttgttttttatttctctttgttaatttggggtttgggtggagatgatgcagatgtgttctagctgagttgaaacgacttggtagctcgtattctgaggctcttgaggcagctcataaacttatagttgcaaggtaattcactttactgctgggtacatatgctgttaaatggattctttcctcaactttactagtttcaatactatacatgaatgatgccaaatcaaataaccagaaccagagtacatagcttgttattgttgatagttcgatactctttgatcagtgtgtatttttgtatatttaaaattcagacggaactggtcatacatgactattttaatgttatttttttatgattttgagcgaaatgttatgttaaaaggctcactaatttgaagcaatgttgtatttttagtcctaataattagcatctgatagtctttaaggggactactagtcaggatcattgttgtttgtttattagggttttgagatatttgagcgctggtattgctgtggaaatgatcattaccttgattttactccaatttgcagatgtgagcatgaaaaatgtaagagcgcagatgcttgcatcatggaggttgttggagaaaaaaattctgaacatttctttgttgctagtcaggacactgacctgcggaaaaagttgcaagaggtttgttacatatgtataatatatatatatatatatttattttaaatgttgattctaatggttagatatgtctttctctttaatattttctttgtaatcgtggtaaaatttgtttaattaacgaactatatttttttaatgatatccagcctgaaagaatcacttctacctatttggactcagaatacatttgtcttgatattaggttcttggtagcaaacttattatgattattttaaaaaaagatttatattattgatactctgaaagatagttgttacaggtatcttttcattctgttgtaacacttaaagcttgttgaaactcattaactgagcaaagccatttatcttcaaaccttggttagcgagacgtggtggatttgaatggagcatcaatttgatgttgctatctgtggaagatgggttactgattgatgtatactagtacaattgatgatcttgttatttaattggctgttacataacaatcttggagaatttgtgtcttgtccagtctagcattttgaatatggaacttctggttagaccagaattagagcaattttttaaaatagttgctatggttgaattgtggggaaacaaggagacagtatcttgtttagtgcatctgcattatctttgcatcttcatactctcatttcatatctttcattctatttaatacagattcattgatatagattttgtcagtaaacaccttctatattctaatccagttgtatcatcttcccatttctaatcctattcatcccattgtggttgcatcaccttgcctaaatgtgtgaattatcttccaacttggtgttactgattgaggcatctgctagatttcaatggataatccatccagcttcttgtctcatggttgattatggctagatggaagtgtagagcatttctagtagttatttcttgttagagtggttgaatacaaaattctttaacatcttcatgtcttgatgtctatcccatgttccttccatttctggtttattacattatgaattttaaatggttgtgtttcatttttcagtacagccagggttcctatttgtgccattagtgaattaccttactatgtgtcctttatgcactccttttgacattttctgattgagtatggtgcttttcccattaaaaggggaaaaaaaaaatgaaaacttctggttctttatgtctaaaatttgaagtgctttcataatgatgcaagatgtgtagaattgtacacttagacacacatttattcttcttaatctgcttattgcaggtacctggtgtgcctctcatatttggtcttagaaatgctcttttccttgaatctccatctgcatttcagcggcaatatgtcaaaacttctgaagaaggacgattgcacatgacacagaaggagtaccagatatttaaggatagggtaatgaatagattgactggtgaggaagccagcaattccattactgaaataaaggaaattgaggattcaaaagatcagaccataaatgtgcaggcagtagagaagggtattactacaagaaatcgtatggaaatcaaggataaacctcagttcaagagaaaaagagctaaggttataatttacccttgtgctgtatctgtttcctagcttgagtttggttaccatattcagtggttaattgtttatatagacttgaaacgtttatgcaaacaattaatttctttgtaatgtgtgtgtgtgtgtgtgtgtgtgtgcagttttggatgcattttgtgtagaaagatgtcctagttaatttacaagtgaacttaaatttgacattagtcttgagtaaagctttattactttttgcagcttatgatttccatttagaattctcatatttttatgatactgcttttaaactttgcagggtccgaacccactttcatgcaagaagaagaaaagtgaaaaacaaaatattggtcctttgaaggtaggggttagtaaaatttatgttttttcagcgacggtgttatatgttttatttaattttacaatcctctgaaaataaactttgtttcctaaatatttgttagatgtttattaattgcggttcttatgcaggaaacgaatgaagacaacacagtgaagagaagtaggaagaggaagaggtcacataaacgaaaaatggcaacagaaacaggcagttaggtccattttttatatatatatatatatacacacacagagttacaaataggtatttttagaagagctccttgactttactgcttctgttgagtggagagaaaagcaagttttaatccatgctgacatggaaggggaaagtgtatcgagattagttgcttgttgaattttatactgttctattttgctggctatcgtatttttacctacggatacccaatagccgttggtcacggtggaaatagattatgatatttatgatcttaattaggggtctaagtgatccaacccaatcaaatttaaatggttggtttgggtcatttttttaagaaaaaaatgaaattcaatccaaactaatctatttgtaaacgatttgaattgagatggattaatgggtcaaaacatttaattttgtatgttcattttttaaacacaatattttttataagttaaaatttttattaaaagaatcagttacaactttttcttgttaaaaaatttattaaaaaaattgtgatgatatcacacctcattccactttagtggtttctatctatttatttatttatggaaatggaaattaagtatatcatattcgaaataaagaatttcaataaatatagtgaggatgagttttaaacacgtcttaccaaaatcaatgggatattataaggtctattttttgtaaatagattcaaaatatttttagaagtctatctaaaatgattttaatcaataaaactcttgttgttttgatcttgaagattaagaatgtgttaatgtttattcaattcaggttgataagtatatgtaattaatagttaaaaaaatattttattttaaaaaaaattaaaaatatattatatattatatatattaataataataatttaatacaaattaataagttaatggatcgtctatccaattcaaactgtttgagttggattggataatttagatttgctgatgatctgtacctatttatatccttaatttgaatgaattttacttgtaatgttaatgttttgaatcataagtcatcgtagagcaaattttgcctaattagtacctgacttgaggaattattttcataggtatgtctttgggaatacttgaaaaaagatccaaataaataaataaaatacaattgattatcattgtgtggttaatatctatgaaattatttgccaaattggtagttaacaactaaattgaggctgatcttttcagttgtcagctttgcccattgccattcgactgcatatattgcagtaaacttggggcaacattaagtacacaagtatttgtctaacatagacatatatgtttggtcaccaattttggtcttattttttaatttttcagattagatgaaaaaaaaagggattaaattgattttgttttaaaaaaataaaggaactaattgaatatttaaaaaataagagacttaattgaattgttttttaaagtatagaacttaattgaacctttaaacaataagaggatcaaattgaatttagaaaataaatcaaagaattgaaaataattatcaaattaataaacataccgtatattatgatttctcatttaataaccgtagaaaaacttttatagtattagtatatgtatttatttttttatcaaaacaattttacatctcctatattatctattccttaatatatgcaggaccttttttatactatactttgatttattttattttatttaagtgtttatcgagaaatctatccaaattaagatattaatggatccagttgtctctcaatgttacttcaaggaattattcataacaccacaacttccattctaatttctgttaggtcttaatgagaactattatcaagtatcaactgtgatatttaccgcgattcgttcttgctgaatattaggcctcatgctctagaggcaattgtttcttgcactccatttttttttttgcttcttgcaccctcaaatgtttttaaattccccaattatccttcctttgttaccggatggccatttcaaaaagttatagatattcccaaaacctattctaaaatacctattttaaaatatcaaaattgtattctggaataggtattcctaaataagtttctgaattgagcaggtcgtcgcgtgccggtcgggggacggattgggaacgggcccttcggaacctcttccccgggcgtcgaacagtcaactcagaactggtaccgataagaggaatccgactgtttaattatctattttaaaaatatatagagaacctgaaaacttattatggaatacttgttccgtttcatatttcagaacagatattttgaaatatgtttttggattatatatatatatacttccgaaatacttgtttcggacaccatccatcattacactctttaaatacttggataaatactccatggcatactcaaactccttgaacttcctttctaccagattcttctcatcaagtactttcaaccgttcactctccatccaccatttcacctcctttacttccatcaaccccttcacgagccgtgctcccagaaccaagcgatggcctcgcacgagtgctcccagctccaataactaatttcaatcataatatatttttatatttcgtttcattaactcagaaatcatatcctaaaaaagctatctgacttttcatgatgccccccacatgtttattagttttcctttggttagtaacacacaatatacgatttcggcagccaaatgtaaaacaaacctttcaaactccttaaaataaattagctctccctccacaagttaatagcttggtgggaaaaaaaaagaagataaagtagccaatcaaaatgcattaaaatcctatatttgggagcaagagtattaaaaaaataacacaagctttttcacttgcgagtgagtacctatacttcctgaacctttttgaggtcaaatcaaacccacatgcatttgcttccccatattttgaaccaaaaggtgatgcatgtaaataacctggactctgtttcagaatggggaaatccccctctctgcctcattgacaagattaaatctttacaacctatacaaaatttaacagattcagtaactgaagttagaagatgagatcctccattctttctccgtggagtctggataatgaagccatgtaaatgaatgccattacttttttgagaaagtgagatatgggtcttgagcaatggtcaatacatctggtctctcggcctggttatatgttagacaccgtcgaataaaatcctgaccaaattaattgtagatacagcacagacaattgtcaggtttgactttgacagtattgtagatagtaggtactattttctttctacagctaaacatagaaactattaaccatatatatgtatatatttgaggtctttaatggaaacaaccaccttcctacacttgcatatggaataaagttggatagttcttttttgaaaattaccataaatataaccttacaagaaagcatagttgtgtacatcactgaaaatcagaataaaataaaggcaaatgcactgactaagaaatcaaaagaggaaagtttttattaaaaatattattaatacacgtctaccatgatttctagtgcacctcagtgtgatttccaaaaaactttttattttttggttcctcaatcaatgcactcagggggttcgttaacaacacccaaatataaataaacaaaattatgaaataaggccaaagaacaatcagccatgagcagcaattatcagaaaagtgtgcaactcacctttgcctcgttagaaatggtaggtctagaaggaaattcaactttgcgtgccttaataattgtgtcttcgcgaagtattctctcttgtgtttggtcgtgcccaaaaggacgtcggccgaagagcatttgataatacaaaattccagcagaccagacatcaacctgttttccacaaagtgttagaaaatacaagagccaaatgacaaaaaatatgttaaggtgatgatccaagagttagttgtttccaatcccaaccattgtgacacttgcatcaaagtgaaatatcctttgaccaaagtgattgagagtgagaataataacaataacaataataaaataaatttatccttgtctatacaacttagaaatttattgacctttgatgatataagaggtgtcttgctgagctcaaagcattcaggaggtaaatacctgcaaattgaaaaaggaaaagaagaatgcataagatattttacgaaattaaattttggaatctcaaggaaacattaaaaggagcttcaaatgttaagtcagattgaggagagtgaagctttaaacatacaaacttggaccacttcaaattttggattccaaaaaagatttttaccacttaccaatatgttccagctccctgggatgtaagttccataccttgggatcccacatcatcctccactatcttactaagaccaaaatcagtcactttggcaacaccaagctcatcaaacagaacatttccaggcttcaaatcataatggataatcttctgtgttcttttattcatgtaaataaggccttgaaaaatttgaaccatgatgaccttagcctccctttcaggtaatacaggtgttgctttgaggacagcatcaagatccttccctagaagaagaataaaggagtgtcaaagggaaaatgggttggaaaaacactaaatcaaaagaaaacagtgaatcaacagtacataccactacaatgctctagaacggtgcagaatgtgttttgatcaatctcaaaaatgtcccataaacgaacaatgtgacgatgtacaagagtcttgtgaatattatactcccgaattgcatggcgtatgtagctttgcttcttctcttcactccattgagcatttaaaccatgaagcttgcatgcaacatatctatgctctaccaagtcgaaagcctgctggaaatttcttacttcaaatcactgcaaaaaggtatttatttacaattgccaacataggccaagtaattgtctagattctggctttagtttctcaaaaccttgtataatatttggtaaaagaggagtgctagcaacatactttctattattaatttattagttaaaatttattggaaactttaaaatcattagcgggaatatgttaaatattgatacacaattttgagttctaataattttcagcaaataataaataatttataaaagtgtgctagagtgtgttgttggcatttctcttgctaaaataatatcaatatgatcaaatgattattattatactttctgatagttctgatctgaccttgtacacctcactgaatcctccctttccaagaaggttaagaagggcatagcgatgatttagaatctgaaagttgttaaaccgtgaaccatcttcatcccgtatacgtttcatttcacgaattaacctccccttctctatttcatatcgttccctctcccgcaaaataatttcttcttcctgaacattttcctgctatcagaaacataaagaggaaagaaacaatcggaccagcagaaatatcaacttactcttttaaggctagctaatcgagacttgtagatctcatcatgaattagaatatcttctggtaatccagcctctgcatctgttccatcactcttatcttcaatcagagaaaaggaccaaacaaaaacaaaacacacactattaacacatggaccagagtaatgtattacaagatagtctagcagtatccaataacgtgagctccattaggccatcttaagtattacaagatagtctagcagtatccaataacgtgaactccattaggccatcttaaggagcatatggttggtcatgattagtacatatctagtaaagttattgaaagtcaatgtatacaaagtacttaatgtagaaatttagcaagatgtatggaatgttcataccaacaactggcataatggagaagtgaaaaggacagtcccaaatttggtcccatcaacccctcttccccaattttaggtgataagtgctaaaagaaaaaaggaaacagaatttaccagattgttttttcttaaataatttgcgctgccgctcgattgcctccttcgtttctattagttgtttctggggaaaaacaaagaatgatgaggaaaagtaattcatgacataactatgcaaactatcaacataggcaaggtttcgattgcaaaaaactaacagacagaagttatggtaacattgacattatatacccttgctacaaccaaatattactgagaaggaaaacccttgaaactccaaaaacactactatcctataatcgtattcagtcatccgtccaactgaagcaaaaaggttcaggtttaataatatttataatctaagaaggatagtgaaaagcatgttatttcactgcacaaataaaacatgaaaatgtcttcagataatgacagtttaattatattgaactatgaaatgttaaataagaaaaaatcaatttggatgatatttatcacattaaataaggaaagaatcagaatcctaaaaattgcctgttataataattcctatatcagaataaatctcacaataaatcctagttgaatctgataaattgatcacaatcagtaataatctccagtacaaaaattaaaaagaaaaaatcatggaggagaaaggaaatggaacgtacaagctgggcattcagatcctttaaagcttgaccatcttcccaggtctcggatatgacagttccagctctacaattcataattgaactaataagaaattaaaaaaaatgatattaaatataatttctcagttttcaatcgtgttctatagcacagttgcactgcatcgcggctactggccgctctgttgaagcccgtggtgtcgcagatcactgtcacatgtggagcagggagaattacaaccacatttgcggctattcatggaattagctggagcaactttgattaatggttggaagccattgtgtatccccacaacttttaaggtttattttgttttttttttttttttttgggggggggggggagtatttcatgattttcgaaatcgaaaacctattctaaaacaattgtgtccttgtgtctctgaaacatgacccactattctttggcactctctcaggtgcaccttcttggtgtttccagccttgctctgttctgttgtttctgttcagttcactctctcactgctatctgctctctcttaaagattgttttgccctttcattttcttgcagtaaacactctcgcacaggtctttcatgatttaatccagttctctgttctttattgccaacatatgaatgtctctaattttgggtaatttatataagtctatatataagttattgaacttgtaactaaaatttcacagtagaagtcttcccactatctggtatcccactagagtggttttggggtcagctactctgctatctgagatttaagaaatttcttaaaatgatccatgcatacctgattacaccaacatttccaagtctcaatgagtcttgccgtactttcaaccttgcttcttgtctctcagcctttgaaacagatatcagtaagtcagatattattttcattctctgcaaaacagaaggatcaaatgttaatatgctgctgcttaattgatgcatggtacaaagaatgcttatcaaccatttagttgggggaggggagggagtggtagcagagggctcttctaaattgagtataggtaaagtaacatcaatcgttgatgagaaaatcaatgtttaatactttaatattccaacacatgcatgtgcatgtaataccaacaactgatattgcttattttactctctaaaataagaagctcactttagaagagcgggaccctggcagtggcacacttgtatcaacacggagctgtctaagatttccatttcacttttgcatatagaattcaaacaaacaaaatttaagacagccagtactatctattttaaataacatgtacataataaggagtgaaacattttgatagattcgaaaaggaaactttaattacaactaccgagcaatcaaaaactgaaaataatcacaccttaggcttcatttgctgttcatgatcattcagctccttcagttcctgcatatgccaaaatcaaaattcagaaaacatccttctgattcacaattgagagtttagcatttggtattattatacatataccttttctaactgtcgataaagattttgataatcagcggtctcttgctttgatttacgcaattcctcctccaatgcaacaacttttgcttgtaaagatgcaacgtcctcctaattgaatatagagatgaaataatgagattttttttttgaaaaattacaaaccacaataaatagttgaagtatcaacaatgccattgggatatgttggagggaggtagaaatgaaagaagtaatatcaaacttctaattattttcatataaagccacatattcttttaatgaccataaaatttacaggtggaattaggccaaatccgcacctctaatgaagcagaattatcactatgaaactgatcactgagtctgccatcctgcaaataaatatgagctctatagggaacaatcaaggagtacaatataaatgatcaatctgtaaaattaattgcttaagcaatataacattcttgagcttatgaatagaaattcataggaatcaggaaagattccaatttgcataaccaagagctaaaagacgcaaccagacaataacatcaaatagaccttgccaaatacagagaatgatttaaaaaattaaaagacattacactgatattgagtaaccattcaaaaataccaagcagcaaaaacgggcaccaagatcagtgcaacaaatttcctatcagctatggatggatataatcattccttccagcagttaattctttaagccaagaagtttaaatttcaggtctccattaaaaagcagttaaagaagacatggttgtgcaactatgcatccaatcaggtattgactacagatatataatcacaattgaaaagaccagtttagaaagaaaaaaaaaactgatagggacaattgacaaattacaattccattaacaaatatttcatgggagggagcataccttaaggtatacattctcaatctgaccatttgaagccaaaactgttggaggagaaatttgtgctttggtctgatcagtaactctggaaccacggcctctacctgaaccagaactccctcttccacggccatgtttctttctattcacatcaacattaatttttgtctccatggtctccaaactagtttgccttgcatcagtaacaacctgatatgcaaaatattttaagttggaaacaactagacgaccaatttctggacaaaaagtacacttcttactagttgttaataaagtcatcaaaataatagaaatagatgataagggcgagacctttaaaagtaagcaacttatccagtgagtagctgtttttacaaatttcaacatgagatgcagctattctataactatagcaaagagtatatggagtcatgaaaaccaacctcaacacgttcaaaaacacttgtgctgccatcttcttgaagtttttggcgtttctgagtgttggcttgtattaagaattccccaccattctagaacagaaataaaaagataccaacaatctaatcagtcaagttatcataggaatatatttccatacatctaccaatattccaaatcattaataaacacacaacactgataatcttcatgtcaagtcaccatcataaaaacagcagcaatgaacacaaaacataccacctacatttattatatcctaaaccatagataaatacacaaccaatcaaccaccaaaaaaaattaaacaagagaagcttctatattaacattgacaatccctggcaacacaagcgttggttttaaaaaatggtccacggtcgtgatttgggccacaacatcaaggctgtgactgcaacacgaccacaattgggaccgcatcggccacatttgtccgcaatttgccatgatatcaacaataacgacgagaccacaatgcgaccatgattgtcaccgatatttaaaaccttaagcaaataagccaaaacgataacaacaacagtcctcatatatgcaatcaaattcccacacacattgcactatatagggataataagacttacatcatcatcagaatcactggaagtggatggttcagccaaattttcagcagctccaccaaatttcccaacagaaggaacaaacacagaggaccaacctgattgctgagcagtggtggtggaacccttaccaaccatgcgagcttccaactttgcaatctttgtaggcagagactgatctgattggttggatgagttggatgagaaatgaatgagcatgtcatctgacattgttgctgtaactgcaaactgtttggcaacaaagaaaaatgcttctcaaatctcaacccaacatacactaacaacaaaaactaccccaaaaaatcaactcattcagggcaaaaaaaaacggttccttttatttgataaaaataaaatgttgagtataactaggccatacccattcgtgatcagagaggaaaaggtgaaaaaatttcagagacccacgtgaagaaattggggtttatgcaaaggggaaacggcagaagcagttgaataaatcaggtaatcagagaattgagaattggatgtgattgaaatgaaaaataaaaaggggggactttgagtattttttgccttttgggtgaagaactcagagaattaagtgattggaaagagaaaatctagggttttgttgtttgggaaagtggtggaagaatcaaaagcttgggaaggaagaatgaatattggacctgtgaaagaaggaaggcatgactgcaataactgaagagagtaataaagactgcttttttctttttgggtatgtgttattttgaaattgttgtgggctgtttttgttcagaaaaatttctatgggtaaaaattttgggacacgagtacgtgagaagttaaaagggagggcatgaaaaaaggggtgcaaacatattatatgagttggatttagtgtgtgttcgaatgtgatgtgatgtgagatttgtgatttttaaatctagtgaggtattattgtgatgaatgatgatagttttttttgttacctatttgcttttgagatgaaaatggtgctttggatttctttgaggatcctagatttttatagtgaaaatagatgggtgcaattaattaagtgagaaagtgaaatgtttctcattttgtgatatacacaactagaagtgactttaatgaagaaaaaaaggttgaaattcacatagaaataagcaagaataattgaataggttaaagcactaattgatagccaaaatcaggtattctgacatcatgtgtgggtggtgactgctattaacatggatctatgaacattactgtaaatggatcagaagagatggtaacactctttttgacttcgagaagtataagagtatctttaatattagatcttgaaaatagatcttaagtagaagatctaacattcctcatatccaacaataaaacactcatcaagatcttcatactgcagattcagttctatcacaagaactcttaagatttgcccagattttcaaaaaaaatattcatcaatagcagtaacaataaacacacgggagtcaacaaatccattggaatgaagtaagaacactataaacataaatgaagaagaagaaaaaaacaacccagtgaaaaaaaatgaaaaaaaaatactagggagaaggggggttgcacgcatggaggaaaggggaggtggggggtcgatcgcccggaggggaaggggaagcggttggctgcggcggagggggaggggaaggtggagggtcatgacgtaggaagaaagagaaggtggaggaaaggggaggtggggagtcgcgcgcgcggaggagaaggggaaagggccgtggcggatcgggaagggaagggaaaggggttggctgtagcagagggggatggggagctggaaccgcggcggagaaggaagaagaaaaggtggcgtgaagagaggagagaaaaaaagaaaagtgaacgttgaggatgagaaaaaaaaagtggcactgtggggtccatgtggaatggattaaaatttatctaagatcttaaaatgagatttactactaacgaaaaaatgaaaaagatcttgagaaattttcaatcttacatggcactctggaattcaccaaaaagtggtctaagattccaatttaaaatctaccactaaaaatactctaaggtatagtatagaccttgaaaggaatcttgtaagacctaccctcggtccaaaaaccaaaagcatcatctcatcgtaatcaatctcatgataagatctttaagtaaatcgaaaaccaaaatggcaaaacaatctgtgtgaaattatttttagatttatatgaaatttcttataaaaatttgtttagttgtaactcatcatatgtttattaagtatggtatattgttaagaaaagtagaataaccctgtaaatactcttgaaaatatttgtctcgtgaaaaatatttatggttacaaaagataagcttacatcaatgataaaaaaagatagacttaaatcatttttgccctctatagttttatgattgtatagttggcccctcaaaaaaattgttacacatttatcctcaacgtttatcaaatttagcaattttggccttttgttaatctgccatcaaatttttaacaaaaaaattaatgttatatttaagtgatgaagtaacactgacacattgatattataaataacatgacaatgtaaatatatgctaaatgacatggatcatccaaattgtgatcattgttgtaatgtcactaaattactagtgtcacatttacatatatattagattattagttcatttctcatgcatgttatataaatgtcacatcattacttaaatatcatgttaataatttttgaaaaaaaattaacgacaaactaataatggaccaaaaatttcctaaaaaacaatggatcaaaatttctaaattaaaaaaatgtggagatcaaatatgcattaattattttgagagactaaaattgcatattcttaacatttatgggaccaaaagtgaatttaagaagaaaaatatatattggttaatgtttattagattttctacattgactttccatacattgatatggaagcaatggcaaatgtcattaaaataattacaagaagaaaaaatatcttgaatttgacctctttagcttataaacttcatattttacaatctatttgatttatacaaccacctaacaagaattagggataatcatcaaactcctctaattacaattggtatggtaaatgaaaaaaatataatgtgagtgtagagatatgtgtaggttaaagaattgaatccaaatccaaaattgattttgaataaattttacattattttatgcctatatttaattataagttgaaccaactttgaataactttttaagtttgatcaagaattttatagtgaatttattcctaacttatttttataataaaaacatcaaaacataaatcatatcacttcaaaatcaattttaaccaaaatcaattttacaaaattaattttgttcaaaattaattttgtcaacattcatccaaatattataattaagtttttcataccatatgaccaatttaaaatacgataaaaatattgtaaagaatttcttcagtcgagcaatgctataagatggtcttaaataacatgccctccagtctcatcagatgatcagataaataacatgctcttccaatcatagaattccatcgtctgttacaaaattgccaaggagtcttacattcaaacacaactacactctcctaatttaattggcaaaaggcatagagccccccccaccccccaaaaaaaaatagacttgcaggaaattacatcatttccagtatctagtatctaaacatatgtcgtccattttggcctatgtaaaatacatatcaataaaaccaaataatgcggacaataagagactttgcatgcacaggtccaaaggctcaagtctaggcacattagcgtcattcatttggttaaaacattaaatataacacttaacttggatgataagacaaacaagaagggcagttcggggtgcagttacatccccctccccctccccaccaaattcaaagaacgatagtgctgatagatttgtcactacaatgtatagaaagaattaaagaaaaaaagagaatgaatataaatttaagagcttcaaaatgaagttgattatattggtttacggatatagtataatcaagaaagctaccaccagttgtaacttccccaatccatccctaccagagttgtcaaatctagatgttgtgaacctatgatgaaaagccttggctgatcctcctgaattaggggttccattgtgaaccttcctcgtcctagaacttgtagtataacttccactagtaaaagaatgaactttagtactttcaaatttcaatagatggttgttaccagagccctccaactgttccttttggacttaaaaggagagaattctccaggatgctctgtcatccaaccactatgttttgatttctgtaattctgtagaattgtaacttgtaatgccactttcttccgtaagaacctttttttttccacaagctttacccatatcatgaggtgcagacctatacatcccacttagtcaacctctttctggaatctggtagttttgaaatagcctatagcagaattatgtgtaataatgtaccttatctcctgtatggcttcaattgataattctgaaactctgaaccaaacgtgatcgattcctcatcaagcttcttcttcaacctcctccaagttctcaacatatcagcctgaatcagccccctgtaaagggtgtcaaaggtacctttcagaggaagaaacccatcaacaaataatggcaagcctccttccatttctgcctctcacacaacccatgtatcaaaaccgtatacaagtccaaatccgaccccgccccagtctccttcatatcctcccatatctccttcacaaccttgatcatgtccaacctcaaaaacatcctaatcaatatcacatacgtatgcgcgaactcggagcgcacaatccatcctccttcatcctcttaaacattctcaacgcactctccccatccttcctccctctaaactccttgaagaagcaattataagtcgcggcacacggactcacctcatccctcaccatctcctcaagcaacctcagcatcctcaagccacccgcacgaggcgagacacttgattaccgaagtgtacatcaccacattgggacatatccctttctccttcatcaacctcagcttatccagcacgtgctgcagctataaacatgaagcaagatcgaaaagctagtcacgtcaggctcaatcccgctctcacgcatttgatcaaatacctcctctgcattccttatagttctctcaaacctctcctccggctgcagactcaccttccaacaaactccattcaacaaaacgttataagtaaaaacattaggttcgactcctctatcaaaatcatgtcttttagaaatgtttgcgccattttaacgttcccaaacttgcaccatccgtagatcagaacggtgtagattttcacggtgggggggaatgtgtgtttgttttaattgaaaacctcgacggcgagtctgacgtggccgtacttgcagagcgtgtcgagcaagacgcagaagtcttcgggcgtcgttttggtttctgagaaggcgtcgatgtcgtggaaggcgtgtacggcttggcgcgtgaggccggcgcagatgaggcggcgaaagagggttaggaaatggtgtcgaggaggagtgggagagaggggtgttggggagggttttggcgtagtggagagggagagggcgatcttggagtggtttttgaggcggaggaggtgggggtgagggtgataccgtggagctggaggcttgactcggtggcgtggaagggcttcgagaccagttcggcgtcgctttcatcgcgaggtgacggcggtgggagggagcagaagcggcggaggagtggctctgacggggtttgggaaacgccatgatggtgttgtttcagctgttcacgcttcaaacttcgaagtacagtctataagatgcagaattgcagtctttgcagagagagacttctgacatattatttgacattttttaattatccattttcatatgtgaaaatgtgagccgaatagtgtgatgaaaaattcaaatatatatgataaattcattttacggttaaatgtttttccttgactcaaatgtttgtgtttatctcagacctctaaacctaattgtcatggaaaaaatgtcacttgtgttatttacttggtaagagaaggcataagtgggaggaatgacatagatccatgtaataaattagtaaattatcgacgatccaaatgaaagaatcatgcatatcatgtaaataataaaagttatttttattatgaactattatcaccagttatatagacacatcaaataattttaaatgtaatattgagagtgttgacaaaattatttgaaatttttaattgaataaaatataattttttaagaaaaccagacaatgtttattaagagaaaatttaaagtttttaaagatgtttttatgttattttttttattaaaaattatgtctcagttgaataaatgaatgacgacctttacattcaaatggtagatgtaaaaattaagatgaaatatagaatgtgtaaggaaaatgtgaaaaatataagggatataaaatgaaaataaggatatgataatgactatactaataatctatatatagtgtaaaacttaattaaaaaatttaaggtacatctagggactaaaataataatatgtaattaatttcaagaatcaaaatgtcaaagattaattaagttgagattaaaataataacaaattattaaatttagagactaaattaagaaatcatataaaatctatcacaaatgattctggtttagtatattgataagtttgatattaattacagaaaatctaaaacaaccctcaacttttatccaaatttgagagctggtgtaagattttatgtaataataataataaatcattttagattagagtgtatgtttttattttggtgtatgtctcaacataatctaaaagatgagttaggagaaagttatgacataaacattgtttgatttgtttcaaagcttgtcaataaattggataaatacaaatttagtaattgaagtgatcaacaattagttaggtaaaaaaaattattacgtagttaatttattgtataaagtaaagtttgataaatagtttatttatgtttgacaaaaattaaattattttctacataaaaataattgtccaatatcatgtttggtataagttttggctttaaatcaagagctcaacaagtttcatactacataaataggatatgaattataaagtagatttggttagatggaacaattcatttaacccattaaaaaatgaagtggattaatattgttagtttattttacaaagtagattaatccgacgtattctattttttttgtaaattaaggtcagttgatccatttttaatagattgacccattttattattcttaaaagatcttatgataaaaatatatttaatttgactaatcaacctatttaactcattaaaaaaataaaataaactaacattattaatttattttataaaatgagtcaactcaatccatcctatattttttggataatcgacccatttcttatatattaactcattttgtctagtcataacttcttgggggcaattattacactttaaattaaaagtaaaggaggtaataaaaaagacctagcagcgggtgcaataccaaagaaatggcgtttaccaaagaaatgccaaaacgtcattgcaagcattataaaaagtaacgacatcgtaagaagcaaaaaagaagttccctgtgttgcacaaaaagaaaatagtttgttagtcataaatttttagacagtaaacactaaaattttttcttagggattaatcaaccgaaaaaaatcatgctttttctaaacatcgatttacagcgaaaaaaacgaagccaaaatacataatctgtaagaatttggacatatagagtgtctttaattgtgtgtgtatagtaaaatataaaatataatttctgtatatttttagtatcttcgttgggaaacattgtttatcacttttgttagatttatcttcctaattaagtttcttagtttatgatatttaaatcctaaactctaattaagagatccgttgagcctaattatattcagactcataagttattagtaaataaaatgatttgaaaggaatgaaaaataaaaaaataaaataaataatcaatatatgagattaggatcaaacatatatgtctcactaatcaatcaatgaaagtgatagttaataacaattcctaaaaacacttttgttaaaaagaaaaacacttcaaaatattatagtttaagaataattttacaaaatctttttgtttaagataattattttagtttatatatatagacatatgaatttatatatatctataccgttatgtaaagataacatttttataaataatttatttttgtttgtacttttatttgactattatacctttttaattgttttcaaaactactatctcctaatttctttttaacttctattctctctttcaacttattttataagaaatataaagaggcaaaaagtgtttctcattttttttctttatatttaaggttatatgtacttcctttacctataattttctcatttttttagttcctaagattttttaaagaggtaattggaatatgttattttatttttttacatttagtttctttattgtttatgagacatcaacaataagcttggaaacaccatttgtaatagtcaactgcttttcataatcattgactaccaccacaaatcaacattaaaattttcaatatgctttgttgtcattcatacacttcctaaaaaagcttcctaaagtgtcaccattatgaaattgccccaagtcaagtatgctaaattgtaaaattcttaatggatgagctactaaaacatatatacatcttgttggtatagatagtagtgattcattcctttaagttatttttagcagtacaatcttatatttgcacaatatctagatctcactcattttagtattcttcgcctagagtgttacatgtcaaccattttttgtttggttcgtcctcaaagcatactatattggtagagaagtatgctctaataccatttataatgcccttgggagctgacatctcgatgacccactctccaacactttacttagctttctcattagttataaccctttatacttcaaaatcctccgtatgtaaccttctttgaaactcgataaccaactctaacaacatttgtaacaattaattgctttcaaaatcattgaatgttcctcacaaactaacatgagacttttcagcgtattttaatcctactcaaacactttacaaaaaaaattcttaggatcacccatcctaaaatttatcaaagtcaaacacacgtaacgaaggaattcttaagtgatggattagatgcatttttttagtataagtaattcttttaagtaatcatcaacaatacaattccatcttgcacaacctctagatctccctcattttggtgtgcattcaatcggagtgttacatcaacaagtgataacgttaataggttgcatgttagcataaaaatgtaatgttttggatgccacgtcagcaaacacttaaaaaagttacaatgactaaaaacaaaaaacaaattttagggactacaaacaaaaacaaaataattttcaaggactaaaaaaatatttataagaactacaaaaatataatacaatttataagagctaaacaaaaaaaagggacatatttatagggcaaaaaatggatttaagttttcatcaaggcttggcctattttgtttgaaggtttggctagcttggaagtctaattatgtgactttctatttgaaggtttaatccttaatagattgtctaataaactaagatagactttgaaaatgagcaagcaaaacctagattatagctcatgacaaatgctagcgaggcttagctcttgaactttttaaacaattcgacttattttagtcagacatgtctcaatgaagggcaatattgtcttggcactatgattatttgagtgataatcataggtgatggtgtaaatatggttttaggattacactatgaattaactctataataaaaatttatagaaataacaaattatggtgcaaccatcacaaagtctttgatcgagacaagtcactaaaatgggctcttagccaaaaaaaatattttaaatgagatttctttatcattacaactatgactcaatattgtgattttgtaaaacatattttgattcatgttaatgtaacaccttttagaataagctaaatcttcaaacaagacaagccaaatcttaaaaattagctaataacaaaaaaataaacaaagatgaacttttataattccaaaaacatatacctaactatttatcttatattaatatctattttaagattttaaattttttagacatgtaaatatgttattattttgcttttagtttatctaaaaatatatctatttttattttttttccttattaacatgacactatgtaattatagtttttttttatgttatcatttgttgatgtgacatttaacatgttaatcgtcattaataatttctaacattaatgattaaataaaataaataataaaattacgagaccttttatcttatttttataggaaatgaaaatgaataaattatagagataaaaataacatcttaacctattatatacaatataattgtacgatatataatatgatattttataatcgaatatggtaaattataaatatttttttcaacaattcatgtagtccttattctttcgcaatcaactttttacatttggaaacttttcatattttgttcttatctaagtaaagaaatttaaatcttgaaaaaatttaaattcacaattaattaggatttgttacctattaggattaaaataaatgtagtccttattctttttaattgattttttaaatttgtaaactttttcttattttgtttttatctaagtaaagacattaagtcaagaaaaaaaatcaaatggccaattaattattaggattagaaacaaatatacattaagagaagaaacatttttttttcgttggaaattataaaaactcataatgtgtgtattcttcttcttccacaatttgtttcgtataaaaaatctgaaatcctaaatcactttatgaaaaatacaaaaggtaactaccacgacacctgttgttggtttagagacacatccatgtaagaaaccgtaaaaaattccacatttatgaccatgctattatttttattttttccctagttattgattatatagaaattcggcacagaaatatgagaggtgaaataccgagaatgcccaaagccccaaataaaaaccaaggacatttctccctcttgtctcgagcaatagcaattagcaacacagcaatagcttctggtgatctcgttttctcacagtgatctcttccccctttctctctcctctttctctctcttccattgcttctccataagcaacgccacgcgaggtcaattgcgcaatcgccatgactgtcatgactcctgctcccattgacgtacgttcccttacccctcactctgcaactccccccgcgcttccaatcactcgcgcgttttcaatttcgctcgtcgtatttcgttttctcttatttgcttgcatgatttttgttcctttttgctgtctcggctaatggtgtcaattttgattgtcgttttggtggtgagggttgggttgccgcggagtggatgggggtttcgtgttaggggttgtggttttgatctgcgcgagtggaatttgcttcaattacgatgcattccgtgctcggaatttggggatttgattggggttggttttcggtggatccgaagtagggtgatagtgatgatttctttttggtttgtgtgttttggtttttgcagcagcagcaggaggacgaggagatgcttgtcccgcacacggatttggctgagaataatcaccaacccatggaaggtacttgttgctttctcacacttttgatccgtagagaaacccccgctttttctgttactctatttgttggcttttatatgatcgatttaaatagtttcttactttcttaagagttcagggagacacttcatgcgttgtttgattgccagagagacagagagggaataacttgtgacgaattggtcttaaagagttataggttttcctgacaaaaagtgatttcttgtttgattgcattttggagaggttgtgtgttttcaacgactttattgagtgatcgtatcattgtttttctctctctttccttgcaaccgagtagagggtctagtttatttattgtcccccccctggttttcagctgatttaaggcatgatacttagttgttctttttcatttattttgatgattggttagttgtggctcaacctgatgctgccaacactgtggagagtcagcctgttgaggatccttcaacgtcaaggttcacatggaaaattgacaacttttctaggatgaatacaaagaagctctattctgaaatatttgttgttggtggttataaatggtatgatgcttttactctgtctgagttgattaatgatgtgcttatctttaatgatctcttctgaaccttgttttttactgggcaggcgtgtactaattttcccaaaagggaacaatgtggactatttgtccatgtatttggatgttgcagattcagctagtttaccctatggctggagtagatatgcacagtttagcttggcagtcgttaatcaaatccataataaatacactgtgagaaaaggtagtctattaagtttgttccgtacaattgttgcaagatgatgtactgtgtatgtatgtagaaaagatcattgcttgaagtaagagtaaagaaagttgtgggatttttgttgcaattaatttaagaacatttaattcttgaatatatatatatatatatatatatatatttaaaaacatttgaatattattttccttgtaacattggatctaaatctggatatagttatattacttatcttaaaagaactgtaagcattaacatgttaaataaaacaacactctcactaatgaattccataagggctcttgttaagttataaaaaatggaaactatttttgtataatgcatgtaatgtattgagaggttaaaatgtttgaccttttatttaatactttgtattttgaattcctaacaagtgccctaagctaagggcactcattagcatttaccatgaaacagaagtgacaggggaataaagtgaaaatgctcataatttttgtgcatagccatgtgctttgtctaacttcattttacactgtgtagacacacagcaccaattcaatgcgcgggaaagtgattggggtttcacatctttcatgccgcttggtgaattgtatgatcctagtagagggtatcttgtgaatgatactcttgtagttgaagccgaggttcttgttcgtagaattgttgattactggacttatgattcaaaaaaggagactggctatgttggacttaagaaccagggagctacatgttatatgaattctctactccaaactttgtaccatattccttattttcgaaaggtcaggcattgtttctcttattgtttttttcttcagaagttttatttttttactggatagtgacgaggaagtttggatttgggtcctggatgtcatatttcaggctgtataccatatgccaacaacagagaatgacatgccctctgcaagcatccctttggctttgcaaagtttattctacaagctccagtatagtgacaccagtgttgcaacaaaggagctcactaaatcttttggatgggatacatatgattctttcatgcagcatgatgttcaagaactgaacagagtcctctgtgaaaaacttgaagacaagatgaaggtaaaggatgatctttggattttttgtacacaaacttttttgtggaatactgtctcaaattcatgatgattatgttcattttgtctttagggaactgttgttgagggaactatacagaagctatttgaagggcatcatatgaactatatcgaatgcatcaatgtggactataaatcaactagaaaggagtcattttatggtacttccatgtacagactgaaactatgtgtttaattgtaccttgccaattgattctaatttagtttcacatatacttgcagaccttcagcttgatgtgaaaggctgtcctgatgtttatgcttcctttgacaagtatgttgaagttgaacgtcttgaaggggataacaaatatcatgcggaacaatatggtttgcaggttggttgcaattgtttattttggaatctacttgtaataagtcatttgtagaagttctgaatcttttagttcttatattgggtgtacaaaaatcgttttgtttgcaattgtcaagttctgaatcctttaagtttcttatagttgctgtcagaatgcaataatctatacattttttaatatagtttcacgtataaaccgatgatttttcattttttcaggatgctaagaagggtgtcctgttcattgatttccctcctgttcttcagcttcaactgaaaagatttgaatatgactttatgcgggatactatggtcaaggttagtagtcaaatagactcattgctctatatcatattttcttttctaggatatgaagaagttagcattgagtcagagtaatatggtttcgtttcagtcagtttgctctagctcactattaatgccattgaaagttatattgattaaattaattacttattcttgataatctacagtgatatccttctttatttgtggtatgtattcatttacagtactgttacttcatgtaagaaagtgattcggcacgacttgtgctgtacaatagtgtgttgtgatattgaaaatcatgaaggatttctgcagggattttcttaatattaatttttaaatggaaattgtttttttttttttttgcttatttttgctctgggtcttggtgggaaatctttttgtttgtttgtttgtgtgtgcatgtatttaaaatttatgtatgtcatttgaaacaatcagttgaagggatatattctgctagagggattatgggcattacttgttttatttttcagtccatgggctcttctcttttgatggaatggttaaactcccttttctgtaaatggaagtttaattttcttcttcttccatgtagattaatgaccgttatgagtttcccttgcaacttgaccttgatcgtgagaatggaaaatatttatcacctgatgctgataggaatgtccgcaatctttacacacttcataggtaatgtagtggtaatgacagctctgtatttgttgcagactgcatggttttttatttgggctgctcttctagtgatctctcttttcatgacttctttaggagttgtccttgtttcatgatattttatttggtgattgtgatttggtgcatgatgcccaattttgtttttgatttttttagaagccactttcagtatatatgttgtcatatttttacccatttacttagtctagtacaatccatgttccgtggcttctacaatctatagaaagaaaaagaagataaagtaggatgaggagaaaatgatgtgaggatagataatggaaagaagaaaacaatttatctttgggagagccatctcataggccttctgaattttccaaatcaagtgggggattgtatttttgaataatcttgggacagtaaacttggattgttaatgttaaagtttaaaagttaccctttaaaaatattaatcaataaaattcattgaaattgtaatttttctttctcagttctgatgatgtccattagtgtgcaattatttctttttatgtgaatgcatatttttatctgtgatgttcattatttgacagatttaaattttttccacagtgttttggttcacagtggtggtgtgcatggtggacattattatgcttttatcaggccgactctatctgagcagtggtatgtatactctgcttttaggtctgaatttttcagtgccatatgagctacatgtttttgtgtatgttatgatgactactaggggccacatcacatgctttttggattgtgagaaaacttgaataattagctatacccaatgttgtcaaaattgagatcttacacaagatcgtaaattgaaggatcaaaacatggatcataagattctaccaaaaatgctcaaagttatacataaaagtacatgtgataaatatgcatagataaggaaaatatcttgtaaatgataacattgaactaaacttaaagctgaaaattcatattcattgattatatgttacgcacacaggatcatgtgacaaatactgattttttaagggtgatctatagatgaaagtcagaaccacaattaatgtaagtcaaaaacgagctttttattacagagataaaaaagtgtgtcttattacagataaaattataaaatatatgtgatgaaaatgacatagataagtaaaatatttcctaaatgataaaattgaactaaacttcaactgaaaaatcatattcataatttgtagtttgtaaacgataccattattagttgcatgagagtatgttgtatcttatattttaaatgaggcagttgcagtggtaaacaattgaaatgctgaatctgtttgtttgacacttgtcattagattgataatctacatttctaataatggttatgaatgaacttggatataacatgcaactttctgagagtcccttcaccttctttttgttattttgttttgcatttcttgctgctttactgagcacttcactgcatgctttgattgaatattaggtataaatttgatgatgagagggtgactaaagaagacactaaacgggcattagaggagcaatatggtggcgaggaagaggtaattgcttttttgcaaatggttgttgcttgtatttgaacatttacttcttggttatttaaccacttgtattttaacagttaccgcagacaaatcctggatttaacaacactccttttaaattcaccaaatattcaaatgcttatatgctggtgtatatacgtgaagctgacaaggacaaagtaatatgcaatgtggatgagaaagacattgctgaacatttaagggtaagtgactattcttaggtacttttgggtttaaaataaatcaagccaagtcaaatagctacatgtttgtcttctgcatttaaatttaacttgctaaagaaatgcagatggctaatttattttaagataagcatgttctgttcagatacttgatgactgtgctgaagttctcaactgtgttttttattttatttttatgtttgttatctatctatctatttatatatacatgaggagcaacttaccccagtgtaagttacacctactttcacactatttattaacattttggtcagcaattttttcctaaacccatcattgtaatcgaagttcttatcaaatagatcatatttgcaaaattttagattaatccaaaattatttgatacctcattcatgcgggggattggtttgggtactttgcatggggttctagattcaaacctcattgctgccattgtgacccccaccccccccccccccccccaaaaaaaaaaataaccgcttttgaaatatatgaaaataagaattaattgattatcttttgttttaactggatttgacatgaataatctaggtaatatatagttattagtcaacggttagatagatgaacatcacattttatacaaaattgttgatggcgtaagaatagctatgtgtaagttgatctctcttacacacaaaatttaaactctgcctaaaccaagtcattttttgttttttctcacgagaaattccttgggtgtatctcaagccaaaatcaaaccaatctcactttgctgttgtcttttaaatttctgttgtactatttctactgctttattctggaaaatttgcactgaatttctacaatggattaatgcaggagaggttgaagaaagaacaagaagaaaaagagcacaaaaagaaagaaaaagcagaggctcacctttacactattataaaggttcgtaggtggctagttcctaacttgctatcctagaattgagtactgtttgtgtcctcacatagagatgctgtgggttgcttaatcctaaactgttaacatgtgatacttcttaggtggcacgagatgaagaccttgcagagcagattggaaaggatatatattttgatcttgtagaccatgacaaagtgaggagtttccgtgttcaaaaacagacgtcttttaacctttttaaggtatcatcattaatcacccttttagctctcctgctagatgtgttttgacctggcataccctatttgtttcttgtctgatttgatttggtctctagtaaatctctcttgttaagcagttgcttttttgttgaaaatattggaatataggacaaactagttttctgacaaaatgacttatttgttaatgactcatttaagagggagatattgtagaattatccattgacagaaaaatattgtataaatgctgctgactggaaaatatatccaaatacgatagaaatcagcaagtttcttggcatggatattttcagaaaattttttagaagaaagggcacaaaagtgacaagggacacagatattttttttttgatcggcaaaaatattatatatatagataaagttaactacaagacgtattgaaaggcggctggacaagccagaacctatggcaaactaatacatggagaagcatgaattagggagccaaaagtcaaccaccctacagtatatccccaaaacatataggggcagaaatctaacaagtatgccctcccctggaaacaaaattgtcccccaaattacttgaccaaacatgaaatggagtatcaaaccctttcatcagatttttagtccatgaccagcataggaaaatagcatcgtccataatcttgttgcggttaaatagctcattctggaaaatgatgctgtttcgatgtctccaaatagaccacgtcactgctatccaccacacgagccaagtctgaccacataacccgctgagataccaatatgagtgttgattgaagtgcagccttggattgtctgaacacacattcaagatagcgatccatgacatagattcccaccaaatgggtcgaattttatcacagctgaagaataagtgtgctgcatcctcctcgaggctcctacaaaacgggcacaaaaaatcatctagtacaacatttcttcttttcaagttcagctttgttggcagcctatccctgatgagtctccaaacgaagcataatgcattgggaggggctctcagcttccatagcagcttgtacgtgtcacaggagttcaaagatgtcccttccttattgataaaattataggcactccccacagtataccttccactcgagtcagcgccccacagccaaacatctggttgctgtgtgcatatcaccaacccctgtatatcttctaggaagttgacagcagcacctacctccccttccatgaaaaatcttctccactgaagttgccattcccagccattagacgtttgtgcccctagctgctggatgaactgttgctgttgctcagatatgacatacagtcttgggtatttatccttaagagacagtccgtcgttcttccatgtgtcctcccaaaatagggtctttgatccacatcccactttccattcaattcctctactaatcccacctcgttcaccatttgggttgcaaacagcaccaagatccctccaccaaatggattccccacctcttctagatacccccaaattcctccacccaccatattttgaatccaatatctgcacccaaagctcatcctgattgtggaacatattccaaagccatttcccaagtaaagcatggttaaatgtagtgatgtccttaatgcccagacctccacattccttgggctggcaaaccaaatcccaactcacccaagcaattttcttcttgtcatcgatatcaccccacagaaactttctttggattctaatcagactatccaccacctttttggggactttgaagaaagacaaagggaaaatcgggattgcatttaggacagctctgatcaaggtgacccttcctccaaatgaaaaatatttctttttccacgcagctaatttcctttcacacttcttgatcaacggatcccacataacagcccttcttgggtttgccccgatagaaatacccaagtataagaaagggatgaccaatggtctgcaatttagaaaagaagctgcatttactgcccactgttcagtcatgccaaacaccccaaacttgctcttagcaaaatttatttttaagcccgatgctaactcaaaccctctcagcatagccttgatagttctgacattattttctgtggctgccccaagaaataatgtgtcgtctgcatactgtaggagactaacatccacctgtttttcacccaccttaaatcccacatactgatccttcttttgggcttctctcatcaaacccgtaaggccttcagctacaatgttgaagagaagtggagctagtgggtctccttgcctaagaccacattgtggagtgaactcatccgttgggctcccgttgactaacacagagatagtggcagattttaggcagcctttgatccaagaaatccatttaggggcaaagcccatcctttccatcatatagaacagaaattcccagctcactgagtcataggccttttcaaaatccactttgaacacaagacagctgtccttcttcctctttgcctcatcgaccacctcgtttgctataatcacactatgaagtaaatgcctccaataaatgctgattgacggtggtcaataatggaaggcagcacctttttcagcctggaggacagaactttagccactattttgtagacacatcctataagggaaatgggcctgtagttatccaagccctgggggtcatggattttgggaatcaacactagaaaagaagcattaccacccttaggaataaccccattagcaaaaaattcctcaaagaatcgtaggaaatcagatttaagcacatcccaaaattctttgataaatttaaagttgaacccatcatatgattggcacagacatggggacacagcaaatttgaaaaattatagcactaaacacagttataatataaatgcatcaaatcaatttaatattaacatgaaataaaagtcttatatctaaaaagagagttcatgtttgaaaatcatcagttattgtagacacaataaaatgttaaaatttatctgattattatgctattttaatttaatttgcataaaacttaaaaaaaaagtaaaaaaaacatataaatgcatctaaaagtgtacaagtatttatgaagtgtttagcatggatagatatctaacagctatgacatgatacatgtactatttagaagtatctgttgttcttagatgattgctcaaaagacattctattttcataagcttgattttttttaatctgattgctggctcatctgtgggatacgcaggaagaggttgctaaagagtttggcataccagttcaattccagcgcttttggctatgggcaaagcggcaaaaccatacgtatcgtccaaatcgaccattgacacacatggaagaagcacaatctgtaaattcttgagcttgcttgaagcttctctatattatttttctcagatactctcctttgagctttatatcaattgcctgtttaccctgcatttgttgaatgctgaatctgttcttatgcttcatttcttaatcaacatgccaatttcataattgtcctgtccggttgcttattttatattcaatttcgtgggctggcccaacagtttattccctgtgttggttttgcttataagtactttatgcctgccattgttggctaattgttttttatttcctgaaaatgaataaagaaagcaaccagtataaagtttttttcatactatttttggggatcctgtggtttggttattatgccgttggttatgctaacttttctgtgatttatatcttcccgcttttggtacttaattttgtggcatgtctctttctatatgatctgaaggtttatatatatatatatatatatttatattttgtcttttcttaatctgatttgcattgcaggttggacaattgagagaggtatcaaacaaggttcacaatgcagaattgaaattgcttttggaagtggagcttgggctggtaatatttgtatttatggaagttgcataccattttcatagcatgaatcattaatatccgaatttctgtccttttgacaaactatgttgttatttaggatttacgtcccattgcaccgcctgacaagacaaaggatgatatattactgttcttcaagttatatgatcctgaaaaagaggagctacggtactgagtaatgtcttattttaacatgcggatgtggtaaaaggtgaacctttgttgacataagatgtatttccctattgtggcagttatgttggaaggctctttgtgaagagtactggtaagccatcagaaatcttaaccaggttaaataaaatggctggttatgatcctgatgaagagattggactatatgaggtttgtgttctattgtttaatattttgagttgcagaatgccttgaaaattgagactgtagttcatccttgtatgatctaaacacaatatgcttcttgagatattaggcttggatttagcattcttagtttcatttgtttaataattaaatttactgatgattgatgacaaataaagtgcattatgttacaacaaaaatgatctattctgcatgagcctgacctctaaagaaggaccttcttttattattatttttcatctttaggttctgatgtcacgagtgacttgaattgtgtggcatttgtgaattaaatgtgcctactattattgtgcaggaaattaagtttgagccaaatgttatgtgtgaacccattgataagaaatttacatttcgggcaagccaggtaaattataaacaccattgatgcactttgagttactgtatctttggttggtttattgatttgtttttctatatttgcagttagaagatggagatattatatgctttcagaaagctcctgctatagatagtgaacatgtccgctatccagatgtgccttcatacctagaatatgtgcacaatcgccaggtatttttctttttggtgttcaattaaaggcattttgtatggattgatatgcaaaaatgaaactacccatttattcagtcatattattctgccccttcctcctctttcccccttgtccacgcctgcacatatctgtatgtgtgtaaccaatataccatgcaagtttccttatgtttttaccgtatgatatctgctaattcttttatgtctaatttatgtattttaggttgttcactttcgatctctagaaaagcccaaggaagatgacttctgcctggagatgtaagcattgtgtaatttattggagcaaatcattagatttaatatattgcaatattttacttgagagtacatgtaagtatttgtatattattatgcttagatttgcatccacatcttatactatgtatatttttttctaggtcaaggctctatacatatgatgatgtggtggagaaagtggctcaacaacttggtttggaagatccatccataattaggcttacccctcataattgctactctcaacaaccaaagccccaacctattaagtatcgtggtgtggaacatttgtctgatatgctggttcactacaatcaggtaattattgacttgtcccaactttcaacttgtttcttatttataaagcaaaacatcttattcctttcatgcatgtcagacttcggatatattgtactatgaagtacttgacatccctctgccagaattacaaggattgaaaactctgaaagttgcatttcaccatgctaccaaggatgaagtgagtatatagtaatctgattttattttggtttttatctagattattttccatgacacttttttatttgtttattcaggtggttattcataccatcagactcccaaagcagagcgctgtgggggatgtccttgatgatctgaaaacaaaggtcattgtgcatgagtattatttagttcatcaacatgcctaaactgtacatttactcatcactgaaatcacaattacagccaacgtgcactcatggcttcctctgtatttagaaacaaaagatacatgaagccatgtttgtcggttttgttcagtacttcatttagttattgaagtagtaaatttttaacataatgttgtcaaattgtcttttcctcagtttatgctttttcaccttaatttttgaaatatgtcttgtgctcattttttacaggtggaattgtctgatcctgaagccgagcttaggttgcttgaagttttctatcacaagatatacaaggtgttgtgttatctctattttaactgctcctggatttattaatactcttgattattttttctgaccaaaattatttaagaatcagaattcaatatacttaatttagcattgactcatgatcctccaattttttgtgccactgaaattgcaattaactttaggacattagtccaattttcttactgaaatatgttcattttgtcttgtctttctgcttgtgcaggtcttccctcccaatgaaaagattgaaaacattaatgatcaatactggacattacgtgcagaggaggtagtagtctctttctgtttttgagtgggctgggaagggagatggctttcagtccatgaattcttcctgcttttatttattgaaatgattgcaccagtggatttaaatactcaattatagtttcatttatttattcagtttatatatcaaaataaatgtgtcacttttttattggtattccagataccagaagaagagaaaaatctgggtcctcatgatcgtctaatccatgtgtatcatttcactaaagacacagctcagaaccaaatggtatataatttttaattgattcattttgcttactggaatttgtaatattttgatggctttgatatttcattctgacgttagttgtattccaacctttttgtcacttttttttttcccatttgatttgatatgacagcaaattcagaactttggggaaccctttttcttggtcatacatgaaggggagactttggctgaaattaaagtaagaatacagaagaaacttcaagttcctgatgatgagtttgtcaaggtatttcctcttagtgtattctatgggtatattatgcttctttttcaagtaatttttctttgaatgatggaagtttcattgtttataaatattagttagtaaatttgatgttaatttatctaatttttatattatgtttcttgtttggccagtggaaatttgcctttttttcattagggcgtcctgaataccttcaggattctgacattgtatccagtcgttttcaggtaattcatttatacttggattcctttttttttttttgtgataattcaattgatatttagcatcattttcatgtctgaatttatgcttgcattgtatcttgtgatagaggagagatgtttatggtgcttgggagcagtatcttggcttggagcatactgacaatgctcctaaaagatcatatgctgttaaccaggtttgtaactttgcctgcaagagcaatttttattaagtacattttggtctttttaattgttttgtggttgtccactattctggtaatactgggttttagttttgaggttgagagaactttgttttattacaccatttcaaattgcatgcattttgtttcagaatcggcacactttcgagaagccagtaaagatttataattaggaaactggtattgatgagttctcgtcttgcgtgggatgaatttggcatattctgctacatctatgggcttttgtaaaaacagggaaaatagcgaaaggctactctgtataggccacaattagtgagatcagcaatccaagtggtttctgcaggttttatattagaattgtggtatgtaattctttctgtcaacggatctcaacactgtctgccgaccacagcctgttgagctttactacttccaactgtgtggaagttgttcaagttgagatcattgatcatcatcactgcactgtatcagtacataagatttttggattagtgagtgtatacagggtatagttggtcgactctttttttgttcatcttgattgcttccagattttgttcagtcagtagtgttaatttaagtgagggctgctaaatggtgtagcagatttaatgtaatgttgtaaaagagactcgccagcctcggtataaccccgttagcataaaaatatagtttcctgccgcatcatttgctccatctcatgtggcttttttatttcacttttttctgtttcttcgcctcacctagctgttactaatccccccatctcacttaaatttagagagagaaaaaatttaaggcattggtatttgggttagccagttctgcccatttcttcgtttaatatttccattcttgttgggcttagcttaaaaatgataaatttcaacttaaacttctcatacaattttataaattttaaataaaatacaaataattgtgaatgtataattaatcttatgttcgtgtatatcatgggttaaatgctaataacaaatataaagaaacagagaaaaaaaatacttgaagttgcgtgcatcaaaatatatcctacagcaggattaaggatgccattcggaggttgtggccattcttgagaccgggctcaactatttggtttggacaatccatccaaaatcaggcttaccgctcacaattgcttctcttatataaactaaaaccacatccaattaagtatcgcggcgtggaacatttgtctgatatgctggctcacaacaatcaggtaattattaatttatggtttaaatatgtttaaaatgtatgataaatgatcaaattttgttctggattcctaaatacttacaattattgataatgttagaaatatcagtttttgaggtgacatattatctaaaaatttaaagcaaacattttaacatatgactcaaaacaacaattgtttttatattaaaaatttaaaataaaatttaattatttatttagaatcttaaacatatttaagcctttatttatttattgttcaatctttcatcttgtttctcattcaataaccaaacatcttataattagagtttgggaattttggttggtggtgtatgtacaattataattggagaaaacatatatacgtttattagatgtttttggcatttttctcctgtcaaattagagtttcaatttattaattaatgtattaaaagtattactactaatagcagatgatatggcagaaaatgcttctagacagacccatcctaggtgtttctttatgatgttttcagaattgcgtggcacaaacacttgctcttagcaagtaccattacatgctgccctggcttttctttcacaaggtggacagcaagacgagatacacgagatgacaatgtaactaattaggatataaaccaatgttgtgagaattggattcatcattgaatcggtgatgaagaaattaattcaagaattaataatttaattgagattgagttgaagtcaaatcaattttaatactttattttaatatcttagtaatattaaataaaaaataatataatgtgcaaaaattaataataataaaaattaaatttcatttggaagtgttataagtaataatatataacaaatctagtccaacataatatctaaatttatcaacataatgagctgtttgtattactctattttctttgcaattatttgaaaagaaaaggaagatttgtttctaggttcagaatagagcagttagccaattttgttaggagttttcccttgtcgcgttatctagagaagaaaggaaaaaaaaaatttgtgtagtagcctccaacgcattgctacgtccttgtgaattgtgatattacaaaaataaataagaataagttgggatttgaaaatgcgactttttatttgctcaactcgttcgaacaaatagtaacaattattaaaaaaatacaattaaatttagaacttgcaaccataaacctttatctgctcagagtttatagttgtgagatctaaatttgattgtattttttctttttaatttttgggtcttagttcaattgtgtttgattctgttctagaattggtttggtgtttttatataaacttccctcctttgtctgttgattgtaagcttgaaaaattgattttttttaattaaaaagttttaaagcaacgaaacgtgcttggataagcaacactaggtcatttgttccaaccataaatcaagttaagcacaattccttgactttaagaaacctagactaaacaacgccggaaatgctcttaaatgagtgaattgtggtttatataagttcctttgtttacaaattgaaaaagaagagtattaatggtatgtttggactgttagccgatattcatctactaaatttcaatcttacaccaaattcttgcaaatcaaaaccgcagatggttttaaagaaaattagtttaactttaactaaattttagttgcttgcatgcctagaagtgaaggataataaatatgacgaataggtagtttaatattgttgctatgaggaataggctgtttaattatttgacaatgacatgtactaaaaagtattcaatgatggatttggttatttgcgcgtctaatttgaagtgcgggatgattttatgcaaatcatccctacaaccaccgaatttgtgttttcaattgttttcaagattttttgagtgttcacacgaacatggatcgcttgaaaaattgtatcttagcaattagcatgagcagtttaatattgttactcgacaaataatgggatgatgaggatcctttttacctgtccttgaaatagatttttttttaagctctgtttgatataacggaaagtgactgcaaaaacacgtggtccacagttttttaatcgatccactttggtaaacattatcaaccatcagatctcaaactgcactatgctagaaaacttgtttcacggatcagactgtcaaaatctgacctgaatatttctgttatatacttcattgaaaaattctctagattttgatttatataaagaaaaaaaaaaaagagtagagttcgggtatcatacagcagtgccacctatagtgaacttcaagctatctaatgctctggttttatgctgtaatacatgagattttcatcaaattgcaattcactcatttggttatttacctcaaaactccaataccggtggcctttaatgctcatgagaattgaagtgccattcaagagaattagcacgaattcctacattaattgttgagtattcttttccgtagatgacaccaatgatgatgatgcattgatgcttatagacccacttggttaacttatccttaggccttagtcatgaatgaattgaagctattcctttcggtccatgcataccaaattatcaatgctttaaggctgacctgagggtccccttgaggtgcgatgatgacactgagtctatgattaaaagggcctcaaaattaaattaaattttatagttttataataatttttataaataaattaaagttgttatttattttacgcttcaatttttatttaaattaaaatgtgttaatgttattaaaaatgaaaaaaaaaacgcaaataatatttttttaacaaaaattatgaatttgagactgtttggaaacatattacaattggacgtgactaaatctgtcgctaattatgtctctaattcggttgctaatagtttttgcgacagaatattatgattttttattttttatgtttgcgatcacagaattccgttgcaaacactattagcgactgaaataaagaccaaaattgacgtgttttaatttttgacgtaaaatatcatttaatattatttattattaattttatctaattttaaagtatttttagatcgatcttcatcatagatatgatattttttacttttttaatattattttaattttatatgattttatttaatatattatggatttttagtatatataatttttaatatattattttatttaatataatttctaaatttttatatgattttgtttaatattttttggattttttatataactaattttaatataatattttatttaatataaattttcaattttattttggaatttgaaaaaattgaaaatttttattttttaaattgtaaataattttttaatatataaagtattttaaataaaatattatattttgatacttctcattttttatatcgagaccatcccattaaacacattatcctcatccctctcatcatctctttcatcctttcataatttgataattctctttcaaaaaaagtagaagacaatccaccttttctctttttgttccagtcaaaagcatatagtcgactaactcaacatcgaagttacaccgaaattcaggctttctgtcaatcggtgactcaattgtataaaattagtgtggttaaaacatagacatccaaacaagaaagggaattagaaaggatgatccatatttcatggtgaatgatcaatcgtgcgagtaagttgggttctgtgatccctttctccatcatcgtcgccatctttatctctctgggtaagcgcaatgcaatttgattcactttgtctaatgcagttccacttctatttttagagttctacaatatttcaccactccaagtgcgctttggaattaatggggtgctagaattccaattattgtgtggtgagtgcactttgggatgagtgaaacgagtggtaaagtgtggaaaagttaggaatgaatgtgctttgggataaatgaggttattatataaaaaattcaaaaaaatattaaacaaaaccatataaaaatttaaaatattgaaaaaagttacaacggcgtacaatatgtttttcaaatggtctaacttttgatagaaatgtccgatcgaagtgtacgatatgtcaaaactctcgaaattaagagaagtaattaaaataaataaataataacattaaattaactaattaaataattaaaaatagaaaacaagaaaatttttggatgattgaaattaaatcctaattttgaggtacttagaggcattttttgaaaaaaatagttaaccgctcagggtttctcctctcaatttcgagtgttttgacacaaaatacgcctcaatcggacattcctataaaaaattatgacctttcgaagtttatgtacacaccgtttcatggatgcgtgacatgtgtcgtcacagggtgaaacacgcccaatttgggcgtgacccagaggggtaccacgcccaaattgggcgtgacaagtcacgcctaatttgggcgggactaactgccccagatttgtaatatgtttccaaacagtcccaaattcgtaatttttttattaaaaaagtattatttatgttttttttgcctattaaaaagtgacactcttttaattaatttttctaacattttacaatcatagattcatatcgattgaatttttaattcattgatatatcaacatattgaaaaaacacaaaaaaaaaataaaattataaaatgaataaaactaatattagtattttcataaagaactaaatatatgtaaactttaatatgaaatgatattttgtcaatgatagatgataatgatgtagatctcaaattttctttttgaaggaccaaatataaaaaataaattaaatcataaatttaattaatatttttaaaaaatataaaatttaaagtaaattggattaaaaaatataatatgatctcttttaaattattcttaccttttgcatggacgtggataaagagagtcaaacatatctctccatcttgtcccttatttgtcatgtctacgttatatataaatatttattcgtatttaaatttttttagagatagaaatagaataatagataataatataagagtatcttaaataaaaaatatgatatttttttaaaatttattaaaattatgttatttatttagtgaaataaaatgtatatttgttatgatattatatatctattttgtcataaaatctcaggacctaccttgcttgttataagctcctgcttctaaatttttaactttagagctccgaatcagaatcttttagctaatattttgggaagagcagtatgtcaacttcaatacatgtttctataacaggtacacttgaagaaggttttaagtcaagcaccctaaacttgtgtgctcatttggttgaattactgttaaaacttcatcttgagaagaagtgacaaacataagttaatagttgtgaataggtagttaagtagttaatatcctcgtatacattaaaatgtaagtgcaaatttggttggattaccgttaaaacttcacccttttttatttcattttttggatcttataaatttttgaaatatgcaaaactaaataataagattctaatactattttttttcctagcaaaaaaagaaagagtattcattaaagaaagacaatatcgatatatcggataacccaacaaatacaatttatgtatacatataaaaacaattcatccaataaataaacaagctataactttcgatctacacaaaaattaacaatactaataattaatatatattgataaaaaaaccaccctatacaaaccaatcccagaaatacatggatccgaatattgtgtcagacaataaagttgatttcaagaacaattgctacatatttgctgtgtgaatactagtatgatcaataattgtttcattttattagtccaaatatttaccaatatcgttttaacttccaaattaatgaaaggcgcctcccaaaggtgccagcttttagagcattagaaggctattgttatggtgactttgtcttatttattttcactcaaggaacctcccaaggggacacattggcctgggcgcatctacgatcatcattcatcaaaaattaataattggactgagttggttagggatagttgtttggagaaagtatgtaatggggttaggggaaaccaaattttaaattaaaagttcagttttaatcttagctcgtactatggcatgcttgacatacaagtggtggctattggctagtaagtttttatctttggagattagaatcaaagtttttgagctaataacatcacatgtgaagaccactcattttgatatttacgatcatcacatttttttcttatttgtaaataacttgaaatacatcacgacatgagatttgttacacaaaggacagaagttaaaactacagaaaacatacaggcactcacaaaagaaccatattaaactatgggtaaactgtttccttcccctatgatttgtccttttcactcttcattaattaagcataccttcaacaagtctcgcgagccattgtggtttcccagtcatgaaaacattatatcccaaaagcattccaaatagcaacccacatgcatatcccactgctacagctttccagccaaatcctgattcttcatggtgaaatgttgaatgtggtggccaatcttcattcttattgcaggattttgacaaagggattccacatagcattggatttccagcataggaatcatttccaaatgtgttaaactgtccacctgtaggtatcataccctcaaactggttttgcgaaaggttcaacacagccagaaaattcaaattgatcaaagccacaggaatctctcctttcaactggttccacgagaggtccaaccattccaaatttcttaaattaccaaaggatcgtggtatggtaccagtgattgcattgtgcgaaaggttaagccctttgagagaatgcaattctccaatgactttcggaatttctccttcaaacatattttttgataaatccatggttgtgaaaatagttaatatcctctcgaactccatgtatcgacctttcattacaaccactactgaatcattatagaaatcgccgttacgcatatatttcaaaccagtttgggtgtcattcacactcaccattccttgaaagttcttgatgtatgatgctggcaagggcccactaaaattgttatttgagacatcaaaaattctcagcctgggaaatggatgcttggcaccgaaacaagtgatgacaccatgaaacttatttgatcgcaaactgagtacctgtaactgctggaggctttctagccaatggggaaatgtatcctctatgttattggctgccaggtccaaaacttccagatttgtgcagtgggtcaaagaccttggtaatggtccatccaattggttgccattcaactttaaagtctccaatgcatatccgttagaaaagttcccaggtatgttgccgtaaaggttgttcttttgcaaatccaatgcccaaagaaaaggaaatgttcccagacattgtggaatggtgcctgtcaagttgttatgagccaagttgagtatcatgagggagcttgcattgcacattgctgaaggaatgttcccggtcagctcattatttgagactaaaaagtatcgaatggcattgggtggaattgggagatctccttgcaacttgttgaaactgaggtcaatatgactaatgtacttccaggagtgcaagagcttctcttgaaaccacgggggaatgcttccacgaatgttgttatgagaaagatctagtgagatcagattttgaagtggtgctaagaatttagggaaagtattaatattacaggaagataaatataagaattcaaggttgggtaagatgtagtcagcggtactatcaaagttaatagagagaaaactattgtgagaaagatcgaggtaatttagattttttaactttgaaaattgatgaaagtccagatgaccactcgagtcaattgaccccgtgaggcggttgttcctaagatccaaaattaacaaggaaggcaaagaataacaccaacgtggaattgttccatttaacttgttttcagacaaatatagaaactgcaattttgaaagtttattgatttggcttggaattggaccctctaatttattatgccttaaatctaaaagggagagttgagttcgaataaacaatgatgagggaagcagtccatcaaaattgcaaccccatagctgtagtttgttaagagacttcaaatggccaatggaatagggaatgtttcccgagaaagcagtaaaagagagatccaagtcccttagtggagtactccagtttgactttggaagttcacctccgaggtctttattaaaatccaaatatagtttttgaagattgggtaaacagaggatgtcactggacagattcccttgcaattttgtgtatctaagactaagggagatcaaagaggaagagagattggttagcaatgacaaagagctctctccgatacaagacatgtccacgccatctaaattaagctctcttaaattggttgcgttttgaatgagcttcttccatgtgtatggatcaattctcattcttgggtggttgggatcatcatttatattgtagtcgctgccgagatcaagtgacagtaatttggacaagtgagagattgtggagggaatgtcaccaaaaaaatgattataggataggtcaagaccaatcacatggcctgagatgatgtcgcactcgaccccaagccactcacaacaatctgttccgttgatcccaaaataataataatttggaatgttgagtgagtatttgagttgtagcaagacagagctgtcatcatggttgcagaaagaggaagaagaagaagaagaaggaaggaaaaagaagaagaagaagaaggaagagaaagtatgggagtagaacccaccaaacattcttgttcatattcatcctttcaactcaacaacaaaactagagacgattttttgatagaaccaattcaattcacaaacttctatttataccctacgctgcttcaaagcctttcatttcgatctaactctttctttgctttttcttccttcgcctgtgatataataatatatttgtaaatcattaccaaaataattttgttacttagataatatttttatattgccaacaattaaaaagtctaaacatttataattttgctactaattgattatcgtgacaatgtttaaattaattatagtttcctctaaatgtaaattttttttactccatttatagtgtttttggtttattatagtctttcggatgaaacacgtatactgtgatattttgaatatatctaagctctagtctacaaatatccaaaatgagatccaatttaatagtgcttttgttagaaccatttaagctatctacaacatgcttattataatccaattcgatcattttatttattctcttaactctcttttctgtctttacttttagtttcttttaatttaggggactaaaacaaatgaaaattcctcttaaagaactaaattatttatacaaagagaaatatttaattttatttattcaaaattatacatgttattacattattatttttttaaaatacattttttatccttccaattatttttttttcttttcatccttacaattttttatttatttttaatacttaaaaattatatttattttgttttcagtctataaaatacttgcaatagtgcctgtgaaaaaaaattatctaaaataaaacaaagaaaatttggaaggattaaaaataatttttttacaaaaactaaaagcataaaaacactaaattataaagactaaatatatatatatttttttaaaaaaaattagttgtcaaatcaatctcttaaaaaaattcttcatcactaatttagttctccaatgatttgatgactaaattaattctaatttaatctaccatcaagttaatttcttaaactttatatgttattacttttttcatttcagttgtcacttttctagtcttgatcttgtcaaagacaggtaattttttattttttatttttttataatgaatgacgattgacatatgtttaactttttagattatcttctacaaggtgtaaatattagaatcttcctacttatttttgaagttttgccactcttttaaatgtttgaggacaaacaatttgtttaactttggggtatgagttggccaatctaacctacttatttcattattatcattaattttttgtactcatgtatggtactaagaggaaaaaatggttgcaaaaaatacataattgtaatatatataaataaaaataataaatattctcgtcattaattttgttaaataataaattaaatagataaataaattaatcgaataaatacacgatatttttattaatataacatgttaagtttcaaaatttaattgagacaaaaaagattacaataatttttatttttattttattttatatagtttattatcttaaattaaaatttaaatctaatttaaattagaattaattagattgaagtatttgtattgaaaagagataaaatgataaaaatattcaaataaaaaatttagatactatataaaaaagccacgtaacttaatgtaaaagagaataattcataaaaatactctcatttaatagtagaattcgaattatagtgcaaaaacagattaattacaccaagagttgtaaattcattattcaacataactataacaaataattaataaaggttactaaaattgtcttctattttttttttcttttacgaagagaaatattcaaatttatttcttcaaatttttttatattacaattcttagttttctttttctttcttaaaaaatcagttaacaaattatctcttaagatttcttcgtcattatcttagttctccaatgattttataattaaattcatatttaaaagtttagtctatcatccgtaaaaaaaattagtctatcaccaagttcaagcctcaattttttatgtaactacttatctcatttttttttaatttctctggttcgtattttttgatgacaagtaacatgtttgataattctttaatagaaacttgtaaagcgaaatgacaaatattcaaataaagtctcttttgaatataaattataaatgtttttgaaagttttttttactaaaaatataaaaaaaaattataaaaaagttttcataaatatttttagtcttatattcaaataatttctatgtagtaataatatgtatggaccataattataagcgtgaccaagggttgctcgctttcttattcccatttcgtgggtcattttttattttattgtgttttgcttactgtttttggatcataattatattgaacggaaatcaaaatagaaagaataatcatttttgaatattttattttgctaaacacaaaattaacactcattatttatctctatttttctttctatcatgttacttatcataattatatattacatatattatctctttcttagaaaaagaaaaagaaaaagatgagaaacttacggaattgaccccgtgaggtggttgtcactaagatccaatcgtaacaaggaaggcaaagaataccttcaaggtggaattgtggaagtttattgattttggttggaatggggccaagtaatttattaaatgataaatctaaaaaggagaattgagtgagtaatcaatgaagatggaatcagtcaatcaaaattggggatgttgagttgagtgaaaattaattaaaacgcaagcaacacgacccagaccaaaacggagtcttcccattctctttgaaagttttttctcggaaagtcttagaaaaaccaaacatttatcatttaattgattccattttataataggaatattcaaaattaaatcaaactatttataaactgtcaaatcaataaaaaataagaatcatttaaataaaaattacaaaaataaaatataaaattgtatatttttataatttaatttatttttaaatcttatcataaaaaataaactaaatcaaataaattatatattctaattatattaatttttattatgataaataataataaacattaaataataaacattaaataatatataataattatgtaaatttagttgataatattaagttatgataatagataaaaagataataaaattatgaaactaaatcaaaccaatcataaaaaattaatatgattcattttaaatttaatgttattcgaatcaaataaaaatttgatgaatttttgtttaaaaatctaactaaactgtatcacttacaaccctggcattttctattcaaaatttgcagaaaattaatcttgtcctcatctactgtaccaaataatgaaaagatgctgatcacttttagctaaggcattatcaattatgataaactattatgtcaagttccgtatgtttttctggtacaagaaggtttcaactaaagcccctatgtttgtatgcacattctctgtaagaagagactagcatgctgctcaagacctgtttcatccatctcgatgctaccttaattagtacggcttctagtaaacaataaaacacaaattcagcacaaacacttatagcttagagtttcactttattaatttatgtcttgaacgtgcaaaagaaatttgagaattacctgggttgtgtcagtttcaacctcaatcaatgtgtgaagaaccctcatgggttgctgattctcaagcataagtatgtcacttttgatatatgcatgatatacaatttcccgtgtttaccatagacaggatcattgtcagcataatcatccggaacactatcattggctctcaaaatctacaacatgtaacagccatcaagaatcatcagttgcaggaacctcggcgtgtcgtgcatccaaattggatctagcggactgtacgagtctcaactcttcaaccacttgatccatgcaatggaagatgagctcaataggctttttgcgcctcttgagaaaatggataggagctcggtgcttgtgctcttccatgaacttcagatgctcttgaccataatggtaaggaccaaaggacactacttggggtttgcaggcctttttgttcatctcagtgacatgtgagggaattttgtaagtagaatgcgtctcccattgcttctcaggtgctgtaggaccatcactattgagctcctcattgatttggaccacccattttgtttctttcatatattactgtattcacattacgtgtctctctttgaatcatggcatactagctaggttaatcattctgaatcttatagtaatccaagcatatgtaaagcaaaaataaaatgtggcgccaagatgttattgtcaaattaaaatcttcttttcagttttggaggatggcgcacagaaggtgctgcaccgcaatagaatcttcttttgaacaaaattaaacatgattatatatataagtagtattactactcccaacttggagaaaaaatgtgtcaacttcattcatagctaatatatatatatatatatatatatatataacattcttggcccatctctaaatatattcttcacattaaaggaattgttgattcattagttaccattagagagttggttacagatcaatagattgatgcaatccatcatccttgaaaacaattgtcaggagaatacttgttcgtaatgatgtattaagaaagtcgataattctgtccaaaaaaagaaagccggtaattattattatctcatattaaggaaagttgctctgaagcattacatagctgttttatacagctgcagttaagttgtacctttttacgtacccatcactgttgcacctttttctattgggtgcctcctttttgttgggctatatgtggtccaaacttgaaatcccaaattaaagcttaagtctacgtcctttattttgaatcaccattattttttatccatctcaatgttagttattaaatgttaattttctattagtgaaaacttcaaaatcatcaagtccacaacttctctctatgcctttcttcttcttttatcattaagcaaaccttatatttccttcgatttgtatcaccataatttgatattattatttaattagaaaatatgtaatttattttattaacattttaattaaaaatgaaattgaaaattatataaatacttcaaaattaacttaagtagagtaatcacaaaataaaaaagctaataatgatacgtgtgatatttaattgtattagtttggtttggataccaaattaaacaaaaaaagtaaatttatatatattattttaagtttttttacatctttttttcttatatagaattttaagttttatatcactaaattaaatatttttaatattcttagtatctccagaaaataattaaatcaattccaagtattgatattttttaattaatatataactttttcacatctatgactttatatatctcattaatccttctacttaaaacatgcgttataaaaaaaacttaaatagtaagcataacttaagatacttgtaaaattagataataaatacataaatttgaaagtttaaaaataaataataatttaggtggtgagttaatttaaatttaaatagttaaatatacgaatcaagccaaaaataattgatttaatttgtattacaagagaaataaaatcaaccatgtaatcaaactaatatgaattcatttaatttttttttttagattaccaaatttaatatactaattcaatatgataaaccttacctaaccacacaagaactattgtttgtaatcttctttgtagtctttttggtcgtgtaaatggctaccatttaggttaaaatagtgaagatcagggacacgtacgaaatggggtgcttaggtgaaagttcattaggcctagactcatggcaattcctacttaacttatagtctaaccaacaacttaatatatatatatatatatatatatatatatatatatatatatatgtagcacttcaatccgagtgggttgacttatctgtaatttggaatcataaagattaaagacaagtaaactttgttcaacaaaccactcgagtgacttctgatcacagtcacaaacaaccgcacaaagtaaaagatgccttgcaggtctagtggacttgatgccacacccaacgttgctactactccaacaatatatacacatttttcaaccagcaaaatacttatgtttatatatatatatatataaaaccatgtgatgatctttcaaattcatgaaacgttacttgcttagacatatgagctagagttgatcatattttctgaatttcactaatttatattttaattagttttctttctctttaattagtccaaatattgtggatattgatgactagcttgcgcaagcattgttcgaaaggttattcagcagcagatattagtataatacaacattgatgttaaatcgagttacctcgaaacacagtttggtttgttcgatcctcctaaatagaggtaagtgcatgtgaacccaaacagtagggaccgttttacgttgttgcagatatatatcggggtcagcttgcagttgcaagtaatccactcatgcaagggctaattgaaaaagtatatggttttccaactcttaagtgttgacgcaacgtacctcaatctggccatgcatgtgtttgtacaattgcaaaggacatgaactatatatgctccggtttgtattaatttttaatcgataataattggaaagcaatttctttcaggctagctagagagatgaataatgtacaacctatcttatcatatataagactttccatacaactatgtatcaatcaaatatagtctggtacggtactggtaaattattgatgtagtatatggtcttcttttccaagtaattaacgttaggtttttctttattcttttagataattagatttgtctttataaatataaccatatatatatatatgaattacgtgatgtgtggataaatatataagtgaaatctttaatttagtggtgattaaaaagtatgttgaaatatattattttaatttattagtttttgttgaagtgagatgaaattttataatggataaaaataaaaaagttgagcatcgaagagaagatccataaatttaaattttaatattttatattaaaaaatggtgtcaaatttacttatataattgatcatgacttattgatataaatattttcgatatttattccttgatttttcaacagttttaaatatgatttctttcaactatgtaatgcaagtttattatcgtaaatattttggtatttacattaaaaaaatatttacaagaataacctaaaatttaaaatctttctagcataatccaactatatatatatatatatatatatatatatattcagttacttcaaaagtaattctttaatttagagtcatttatttttttataatctgatcaataagattaatgacttattatagctattagattttaagaaatgaataatgatgatgagaaattactgagtaagttaatttcttctctctttatatatattctttgttgatatattatatattttagtaaagtattactcaagaatatctaatcttattagaagtttgagtacatgatgaatgattagtaagttcataatgtatgagtaaatcattatattctcgagaacacgtactcttgtacaatatatttttttcaatatatatttatattttaaaaacccaattttagtgtctcattattcattaatacacgcaccaagtgaaacataattttaaacacaccattaagaaaataaataaattgaaatgaaccaagatatttaaaaattgtttaatttgtctagttgtaagagttgatattaagttttacataagctaaatcacatgttaacttagtatagaattcaattgttattaattttaaagttttataattttgaccctttgaaatattatttattttacatgtaataattatcaataaatattaattatgtttttttttttataatttaggcaacttgtattgagatttaacacattacatgtgttacctctgattttttaaactctacacaactttccgtaatttatatagcataagactatatatgcctcccattgacacattttttcctaatttctcatactgttatatgttagtataatgtcgaaaaggaaatactatatattatgtgaagtgtgaacgggagggttacgatgctagtgtatgttcagatgtgttcctctttaaggcaagtttgaaagacatatatattataatttatgtgtttgaatgtccttaatttttaagtatatatagttaatgatacttgattaactttgcatgtgaggataaaatcttcacacatgtgcttatatatattaattataaaattaagataagtttaaacttacgtacaaatctgaaatgttcaataattgaatccagagactaattagcaatttgttctatatatgtataatggcaatttttacttggttttgacagaaggtacaagaggagacataagtttaattataaaccataatagtcaacgatacatttgaaaactattaattattaatatcttataatttagatttaattcttctgtatgtgacagctatgaaaataatactttgaatcaccatgaaaccactcattagtttctaataatactcataaatgtcccttacataagaatagtagttatatacattatgaataaaacatgtcgatgaacttgaaatttggaaagaaaagcataatatggtatggattaactccttgtgtggggtcattccagttggaatatcagctcatttcatttttcttgaatttgaagacgatacgataagcattgttttgaatttgaaattaaaaaatattagtgttgtattaatgggtgatgaaatttaaataatttattttaattttttatcttatattaattattctttaaaatgttacattataattaaacaacttatatattttactttaatgatataattttaaataattcttaaattattaattctttttaatgattttcaaacggcaaaaaaaatgttttatttataagtaatcagaacttaattttaaataatctaatataatacgtaaaccatttttaatgataaaaaaaataaacaacaatatttaaaaataagtaattcgttaaacaatgaccgctaaaattaatcttacataattagatttaattactcttattacactatagaatagtaaaattgataatataatgcaatttgtcatgccccttcaaaagtgggtgaaaaaatgcatatgctcccataaacacatatttgaaagtttatctgcgtttgtgggcggaccacagaatttcagtgccatcacatttttaatttcttactttgtttggatgagaaaacaatagctttgaaccgtacaagcttaaaaagtgcatctattgacctcttggtattatttttttctctttgaactttatgaataatataatacatgacttgtggttttctcgcacttcatattgaagatgctatatatgaattatgataaaccactaaacgtaataaagaaggatcaccattttgtttgttagcaagataatgcaaataactttccgccaaggaacttgcatttcttcttcaaatcaatatccctttctctaaactactaattgtcaatcactttattttcccttttggaattcttgactattgaattgtctccaacatttaaacttgaattaacgcccaacctaaccgccttaactataaggcatatacatacctttgcttacagctttgagtgtaaaacagctaagtcacaacacaaaacatgaaagtagtacttcttctcattatttatggtttcatcttttgccataccaaaagctaaaaagccacataaaaacgagttttcaccgagacgcttcaggatgaagccttttttggcctttccctattctcacccgtgcaagaagatacatcaatatccactagatttaacattgacaattcgtgctcctctttattggcatgtattttttctaaatgatactttttttggtctagtttaaatatatgatactataattacaggcgttatacacggctcaatgattcaatacaagactattagcattacgagacccataatctattgtatcttgaataatagaagaagggagaggttttgattggtctgttagcggaataagtcaaatattttttaaactattcataaagagattacggtatcattacaaatatctttttacttttaaattagtcaaaaaaattaaaacgtctcccatttatttttatgacagactaaagtagtattttttttctaaagaaaaagactaaagtagttatcatgtttttttggtatttttagtaccaaaaaatgataaatacaataattatttcaattatttgaattattaaattagtaataaatatcatcaaagtattatcaacaaattaacataaggttatattcttttaatcaagtaatctaaacttaaaatcttgactaatttttatgtgtgttcttcattttcgatgaatattagtttttatttttgataaaattacttcgtatcaatataataataaaaaaaattattaaaatattattataataacatactaatatttaaaaaacccaattttaaaaaaaaaaaaactataattcttacataagcttgcacagtgggtaggaattaagaacaatatatagtccctcaaaatctacattttgacttagacccagcaaatacggatctacttaacctaccttatggaggtgtgtatgtgtataaccttaataactagtactctagctagtatagttccctttcaacatgtttattattttaattctatttgattaattagatagcagcactatttcaatgccacatgcctctcgctgcttgctgttccaacaaggccaattgagtgcgtcggcgaggtttgacttttcatgacgaaaaagcccctagcatacttcgcgtgctttcattgcattgactctttcagaaacaaaaaacaggggcattttggtcattcgtaatgcaaaatcaaagacccttctctttgccttcaagctttcacatcatatatgcacctcctatgagttcgtgttcatttttctatgtcactttctcattgaatattgccaccacaccaccacccccacaaccgtcattctaggccccctgatccccatatctatcattgaccatttgatcacaatcacacggcaattaggccatgccccaccacccaaactcacacggaaacaccacaattgttttcataaatatcaccagatttagtatacacatgttggacctaaccttgtccatataaatatgtacacaacataaacaagcctagcctacaccaaacttttgcatttccatcactctgtgtttgtttctccgaggccttattacaaaaaaaaactacgaacatgaaacacttccacttgttcctcttcctcgctcttctcttccttacaccaaaaattcatgccattaggatcaaattctcaggcccttcaacttcaagccatcaagattttcatccgtgggcaaattctccaatccgaagcagcagagaaagagagaagtctgagaaacgcagagtgccaacaggatccaaccctttacacaacaagagatagatagcttgatctctctcagattttggtggcaacagcaacatatatagtgtaatcagatatggtttctttcttattcactaccttctttgttatatacagggaaatacaaatataatatatatgttatattatatgctagcagaattcaagttgcattttttaagtcatgttagaaatatgattgttaattaattagctagattagtggagagtccttgtacagaaggtaaagagagcattttgagtttttaggaagtatgaaacaataaattataaattgtagtttgtgtatgcagttttatacattttctttgccttaaccaaactttcctgttttattgcaattgaagaagccaaatttttttaagatcgcaatcgtatgctttattcattatacaatcatagttttgcttcttccatggctcaaaatcaaacaagggtctccataattcacaactggttgcatgtcaaatgagttacaatttcttgggcaaccactgctaagatttgaggtttcgttggtcaaactttgggatccaccatcagacattagcaaacatttttcaattttcttggtcctcctctgcctatgtcttgaaaacaactgttgagaagaagaatatagaacacatagttgactaacaggttctcacagattttttgggtttcgcatcgattcaagtgtggggtgggtgcgtggggggtgggtgtgggggggggggggggggggggggagggggtgtgcttttgagtttttgagttcaaaattaatatatgaaaatgaaatggcagtcatcaaagatcaaacagttaagtcattatacctcctctggtgtcataggccccaaaccttgaatgcagtgtgttaaatacccattacttcactcaacaaccatgcaaataattaataaaactccaccatattgtgcacacacaagaatatttgttgccagaagatgatagactccacatgttcttagtctcaccctacctacataacattttggtcccagaacctcttgtacatttattttttatattttcacttctaatttgtttctccaaaatggtagggtagttaggataaaaaaaaaaaaaaaaagagtacaagtatatatggtgtacagtgagtgtataatatatctcacttccatagttgcatgcacacaaaatccatataggaagctatttggttttggtgtgaaattaaggtggggtttgtggtccacacaggggtggaataagtgcacatatatactaattctggttacaggacgcccaccaagggcaccaccatctccagctatagcctttttggtgtgcgcgtgttgatttttgaacaccatggttgtgtcaaataattgtgtagttggaaaataaaataaaaagtagtaacataatatgttggtgttggatatactcaatgagaggtagtgtcaattgccaattaagattggccatgccaccgtcacttttctattatccatattttactttattaattaagctagacttctaaataataaatacatgttaataaaaaattattattttcctcgtaatattatcattgtcgtcctaaattctttcacaaagaccactaaaatctaataaataaatagaagagaattacaaaaataaacttatcgttattaattcatttaatttttgtttattaatattataagagatataagtcataaagtataattaatgttacattaaaaaattaaaataattttaaaataattttttcacaacaattattataagatgaaagaaataaatagtatcacatcatcacaatttattgtcctaattaatctcttttgtaacatgcatctatttaagtgtttcattgtactataagaaagaattaataaatttcattactagtcatacactgattaattgagttataataatttcaaatcacctaataatttcttgttaaacacataaaataatattgatgattgctttagcgacccatccacgcgctagctacggtaatagtaatagattccttatttgagcttccctgctactctattattacatttttcataatttttaataacataggttagactgcgtgctggctacataatttaagtaaaaaaacagtagagcaaaaaaatagtcaaactagttaaattaaaaattagttaaaattaatcaatattacgtaacactcggtgttaaaaaacctggttcaagtaatttaaaaataatattttttagtgttattttttaatttcttaacctttttagaaatatctttttaattattggtttatttaaaaaaatggcaatctttatgagatttacattagaaatatttgtatgaatgttagaaagtatttaaaaaaaaattgcagacatgcttcttaaactaaggatgaatgtgtaagaaaccatcataattttttaatttgtcacgcaaatcattcaacagtacgtcttgtgataattaatagactttttgttaaatgatttgtaaatgtgatcattaagagcacatgctgggtacggaatcttgaatagtcattacttttgaattttttatattaaaaatataaaatgaaaaatattttaagatttcatcaaccttttaatggtaaatagattttatcataggtttatttgatgtagattgtgaaactgacgctgatcgatgacttatatgtaatgatcatatgattaacagaattatgataaatagattaataatgacctattgttattgttttatccaagactcacgccaaaggattttttttatatataaaaaaaactcacacctaaaacatacttcatcctaattaatcattaggcatcttaatcaattagtaaaatatctggatagagatttggagagtgcaaatagatacatacattcttttaactgtgacgtatttggaatttttttttgataaatatgtacatatacgcccaacaaaatggtgcgtatacgtagaatacattttgacacaattaaaaggaaactaaaagaatttcttataacaaacgctccttggaaaataaaaattatggaagagaaaaagaaaatggaaaaagaagcattgcttaaggtcattccctccttggaagtctcaaggacatatatagtcctaatcatatcatttggagacttaaaggaactagtatttgtatgcttgtgcattgaaccgtataattatagtatttttaagaatttaatatttttaatcacaaaccatttgtatttatctagagtataaaagttttattcaaattgttaaatgaactttttttaaaatgctaattttgaaattgttttcaatttattactttattatttttttattaatattatatttgtctcatatatatatatatatatatatatatacacacacatatagagagagagctgagtgacagagacttttttgcatttccattctttcaagattttttttattaatatgttgacccagagttttataataatatgagaaaattaaaagaggagttaaaataatatatgtgaaagactaaaagaacgatgatagagtttaaccaaaaaattagaattaataattagttaatactatatgaatacgtcttttttttctcattttaatattaacaaacataataaaaaataattttcaatatactaaaagttaatttaatttttaagtgtatttgttttaaaaaattaaaaaataactccaaaaaatttaaaaaattaaaatgtgaaagtgggaatatgaaaagtttagaaacatatgcataaaataaacaaaatttaaatgaaacgattaaattaaaattattttaaacaatttaaaaaataaaaataaaaataaaaatgtcacataatttagtgaaaaaaaccttaatattgttgggtcaaaacgaaccctcaaatcaatatgtgaaaagttgggttattgtcaaatcctcaatcaaatctgtcctgttgggttattgtcaaaccctcaattagatgcggaagcgaaaaatcttaagatgagagagaacaacacagacaatttgtttaacgtgagaaaaccttcttcaatgtgaataaataaaaaatcacgggacactaatccataatcaaacttccactataacaatgatgaattacaaataatcaaatacaacaaatggtggttcactcagcctccccaacaatggtgataatcaaacttctctaaaaagaggtaaaaatcaaactctctagagtgttacagtcgaactttctatagagatctctcaaatgcaaagtacgaaggcttgctcaaatatacactcaagaatgtcacttgagactcaaatatgcaaagcacgaagacttgctcaaatatacaaagcacgaagacttgcacaaacgaaagctctttctcatatgctttcggactctctaaatcagagtgtactgcctccacccctaactaatgcatatatagtagtagattaggtttaggattttaaaacctcaatggatctgggtcaacattgaaagagtaaagctcaatccaacaaatattacatatgatatagacagatatagctttgatctttttgttcgttgatattaggaaacttgatgctattaacttctaggcatattttgccaactatttagcaatgctgatataagtggctgccaaacgttaaatcttaagtcccgcactggatttttgttggagctcttaaattcatttttaatttaattttttaaagtgtttttaactcaattttttttaaaaaaatactttaactttttgttgtcaattgtaaaaataaatcattttgtcttataaatagtaatataaaacctatccggccgtcatcatgtctcaacacagtgaaatgtgaactcacttttttttcacttcaccctctttcctttattttatctcaagtaggtttgcatggtttatcaaagcatgatttacatgtggaactgttctaatttctttcaaaagacccaatataattgttactatggcacatttctttcatataattatcaacagtatcactatcattatcattaattatcatcacgatcatttccttcatcatcattgatcactatcctgtcctctttactgattttattcaacaaatgtgcaattaggaaattaaaagaatgatttgacaattaagtttagctagataacttggcaataagtcaagttttatcaaaccccaattatatattttatctgaacaggactaaattagaagcttgaatccctactagagttaatttttcatagctagaaaatagtaattattttgtgtcaacagcagatttgattattatagaaatgcacatggctagtggcagactcttattattactcataggtgggtacagtgctaatgaggggctccctgtgccatcgatcctaaggtgcacgagagtggtaaagcccatggcaaacaaccagcatgcatgtgccaactgcactgtgtggataaaatgccagaaaagtaatttaattttcaatgtatcgtaaattgatggaatttgttgatccgaagaaattaaatctatatttatctttgaatgaaagggattgaggtttttaaaggtgttagatttgtgagagacgataattaataatacagttgaaagaaaaagaagttcttgaggcaggagtattctaaataggagacatgtgaactaattaaaaggatgtgtgagaagattttttttttttttttgagagagagagagtattaccacttcttgtgattcttgaatgggaaactcaagcttctagagtgatactatttgagaagagttttttaagtttatgtaaaaaatttataattttatgtgagacaatgattttttttggaatttccatggaaataggcaagaagtgtgaagccaccttaaaactcactatttctatttgtgttatgtttttttgtgtcttccaatctttgatttgtgttgagtgtcgagagtttttccattgatgagattgggtgagctaattaattaagttacaaaagcacaatgaagttgatggtagatccacgtaaagatatccctgtatcggatatcttcttgataatgtgaaagtcaagtgattttagtgatgttttctgttagtggtaactaacaatggttacaagtacaaatagtgttaatactcataaatgaataataaaatcaaaactatggcagggagtataataagatttgtgcagtggaagcacgatgcgcaggacatgagagctagtgatgagatttggaaatttaattgaggaagagatttttggaaaaatcaatttaaatttctaacgaattggaagttgatggaatttcttttttgactcgtggaaagtcaacattttatctttgaaagaacgaggatgagattttcaaaggtgttaaaaatttgagacaataattagagcttgaaactataaaagagattattttgaagacaattgtcaccactcccaaattgaaaaaaacagtaatgtgagaggagacttctaaataggagaggatttttggagaagtggggggtggtttgggaacagagaaataaggttgtgtttcacaatgagaggcgggatgaagaagttaatagaacttagatatttgtcttttttaaattctatcattaacgtaattattaatatatataactcagtgattgaaatatatgtatagaaaccaatttcttagtggttaaaaagttaggagctaagttcaaatttttaacaactaaaattatgagacgttaagtaattaactaatataaaagtaaatttttattgaaaaactgctttttatatatttcaatcacattaataatataagagagaaaggatgctacattaaatatagtaataatcacattaataataaaattaataataagacaaatatcttaaagataaaattgtttaatctcatttttattttgagtcaattagacaaactcttattagattagataaacaaaccacatctattatctgtataaattaagaggtaattcggtcattgaaattgtgggatgttgtgatagtaattcttgatttttttattataaaagaaacagtaaatatctgaaattgaattatatcagtaaagttagtctcttttgttagtcatttgttatccaaagagagtcacacacactagcctatagagtttcggaatgaaaaaaaaaagtgtaaattataattgcatctcctatattttttttctaaattatacttgatattttttcttttttcatcctaaaaaaattctcttaattgtttaactcacattacactcagattccctttctcttaaacaccgtttaataattcaacagaaaataagtacatactgatcacatgacttttaataaaaatttatgtctaaaatatcatcatctccatcctcaaaatcatatcttggattttacaaactcttatcttcttcaacaactccttttcacttacccccctctttctcctcctccttcatctcccacaacagcaacccctcttcagatgtatccactctccctagaacaaccaccacctccactgtaaccatcgccaccattgtagtagccgtcatcactgtcatatccacctttaccacctcctcgtccaccatcgtaacttcaaccacattaccggtgcgtctggttccctggacactgacaccatcggagtcagtgacatcaataatcttgacatgttcgtcagagttagattcaatggaagaatattgaatgcaatttagaaaaaaaaaacacaggagatgctaatgtaattttctctaataaaaaatttcgtctattcaaatatttcaatcgacgttgactaacgatattaatagaatgatgtaaaagtaatgtataaaaaaaaggaatattaaatgtaatttgaaaaaaaaacacatcaaacgaatgtaatttaatataaaaaaaaaacacaccctactatcaaatttgaaattgtcacaaaataaatgggctataaaactaagttgggtaccaccgacacatattcattgtagtataaattttatttttggtaattattcattccataattttatgtctacaatctccacgcacacaaacccgtgcacacagactgcaatagaattaagttgcgcattactggcacgtactgtcaactttacttctctctctatcatcaacgttactcaatagccattttgttgttgttgttgttgttgttgttgtagggtacaaagtgtcaaaaactgcaatggatataagtttttcttataacagtaggagtttgaatttagataaatttaatcgttaccttccatctaaaaaattaatctcataactaaaagcatatttacttcttcatattttgaagaaaaacaagtataattattttctaagatttaatcatttacgaatatattataaatctatggaaatacctattaaagacaaaagaaaaaaatcatatagaataataacattagaattattttcgttctgcaaaatatgaagaagtaatagggatgtggtgattgtccaaaatctatcaagaccatctcatttatcaaagggatcttattcgattggtagaaaagaataaactgttataaaaaaatttaatacgtgtctttaattcttatatagatggaaaaaaataaaaaatatttcatttgttatacagcatgtcaaactgaaactttttctccaagcatactgatcttatctccaagcaatactgcaatagggatgtgcacaattcttgcttcccaagtaattagataatcttttttagtgctctcgggtctgcttatagagttatagtcaacatttctgtttgaaagtagagcaatactactatacaataaaataagcacatattttattatacaaagcaatttacacggtattacttttgcagatgatctttctgaattacaacatatataccaatcaaggttattgttttgatacgtgtactaagatatattttagagaaaggttaggctagtaacacattataggttaaaattcatggaaaattgcaaaaatttctaggttttgtttaagtttttttttttcttcttaaaaatcttataacatttctaatgtatctatgtctaaattattttttacttaaaataagttttttttataaaaaaaaaaggaagtaaatcttatttgctttttaaactcttattcctaattttgtaatttttaataattttaagtaatatgtatttagacattaaaaaagtaacatgtgttagaaagcatgttactgacatttttgtataataaatatatttttttatttgtagaaatctaaatatcataaaatttatcatatttagacacattattcaactaaatgaattgaacccccttaagaataaacaataaacatatttaaattgattatgtgtaaaaattcaatcataaatatcactaacttattattaatcaatttaaaagtgatataaaatatttttaattgatttaaaatatataaaattttatgctgaatgcatgcttattattatttttaggataagttgacaattattaaactgtttaatctattaaaaagtgaaaaaaatttaaaaagttttataatagagttttttaatctattaacttattaaaagttaggtcacaaaaaaaaaacttattaaaactcactataaaatttaaaataattattaaaaagttaataattttaaattgaaccagatttgtttttagttaaataaaatgataaaataaaaatacacttccatggaagagaacactaatgacatgttgaaactatcaacaaaagatacacccaaaagattattgcacagacctaaatcacaaattaggagattccaactcatccataaaaaataaaacatttcaaatctttaatcatttgtgtcaatcattgtttataattaaacaataatttatctttaacttaattgtttgactaatgtatttttgattattatggataaaacaaatatatgaaaaaatttaattagaaaaatatttgttgttataacttgaaagagaaagaaaagatcataaataagtgatatatttaattgatgtaatgtgatagaaaaaagaaagataaaaataaaagaaaattattgattgaatgtttgaaatttcttattgggaaaatataactactcttgtaattaatgacagttttcaactaaattcaataaagtagatagcttgggagccatataaatacgtaatgaaacggtgggaagaaagtacaaagtacaaaagtaacagagtaatctggaagatgagttttctcgcgggaaggttagctgggaaagaagctgcgtactttttccaggaatccaaacaagccgtgggaaaattagcccaaaaaaaccctcttcctaagaccaacaagaaccttaactttcacgaaggatatgatcatgcggatgtacttcccgaggttctgaggcactctcttccttccaaagtgttcagaaatgatgaagccacctctttttccttctctgcctccaaatgggtccttcattccgatcccaaaacccaatcttccgtatcccctgatgctctcaatcctctgcgtgcttacctttccctgccccaagtctcctttggccccaaaaggttccttcatcactcttcaatttcaattccccagttcttttcactttatgaatcaaatttcatttgcataatgttttcccatttgaatttcaactttttgtttttaaattgagtttaatttttgtgtgttattagtatactctcaattaatcagaaatcatcgttgggcgtgacttttaagattataattatggtaaaaattaacgaactaatcaaataaggtggcctgtcattggatgatattgtagaaatcctttacactgttagtgtatgctatttactctgttaaattttataatttgagatttaatagggcaatgaagctgattgtgattcatcttcttttctaatgtttataatgggtagttttgtttgttcaattgtttatgcacaatggtttggttacacaggtggcaactgcctgaagcagcaaacacggtttcagcctcaacagctaatgaatcgcgtcaagacagatatagcacccatgttaacccggagaagttgaaagctgcaggtgaagggcttgcatatggtacattttcttctcattaacttcctctaactgtagatggatggtatctctaatgcaaattctcactgatgaatatgtacattgttgactctatctacttgacaaacttacatatattaggtttggtacttcatctttcacataacctcatcctgtctctgtggactttatagtggaatctgttgcagataatggtttaaggaaaactggggtgtagacaaggcccaccataatttatggtcatcctgtgatccctctatagaatgtgatactctgttcatctttgaccaaatatgtcaaagttgaaataccaatatattcagcatcaggtgtggctactaagaaacttggtccaaccagtttgagttgatgcggtagtataaaggggaaaggttttgggggagattaggtaatcttattttattgggtgtagagtgtggattaattaatttgagggagggaacttgtgacactttcaagtttctcatcaactaaacgagctagagttaaaccttcacagggtccctgtaacagtagaaaacttgtagttgtgtgatattaaattagcaatattggtaagtttaagtgagcaatcctcaagtatagagctttaagctgtttaagcaatgttttgttatttgttgggagtgttacaataagacagaccttttagtttgagattgaggttagagtgttttatattttgaatatagaaattgaggaggagggagagggagttaagtcatacaatatatgttgcttttatggggaatgaagtaatgggatactatttgggcagaagttacttttctggtgtaaaaaggtttagggttgagtgtgtggtaatagggttaataaataaaaccaaaataggcatcattttctctgtttttggactaagtatgatttagaatatgaaaaactaaagtggggcattagcagttataatcagcaccctgagaaacctgctttggattatgaactcaaggagaaacatatgggggtcatagttatttatagcacacaatatcacttgctatagtcctgttgctatcaccagaagttgcactgttgatacatgtaaggttttgtgctttagtttgtaaataccatgtctatgaagacaatgcattaatgtcctaccattttgggatagtgaagcccgggaataacctcacttttttatacttgatttgcttgtacataaagttcagttggttgtttagttcattagatatgactttattttatttttttatgctcattataccaataatgaagttaagaaaaaaaaataggtttttggcaaattctttgtttatgatgcttatgtttgctaatgcaacttttaatttccaattttatagttggaaaggcgtttgctgttgccactgcatttgtatttggtggtgttgcattggtatttggtgtggtggcctccaagttagagctgcagaatgtaagtgatttcaattatatgcaatttttctctccctttcttaatacatgtgtatgcttttaaattagtcaagtaacccacttgaatgcctaacttgctgcatttttattcaccattcttcataaattattcatcatgttgaatgacatatttagaaccataaaacttcctcgtataagcctttggtattgtatattgatactgttttttcttctatggtttttcagttttattaatagatctctatattgccaaataaattgtccattttagttttttaacttctttatcggaaatttttgttgtttgtaacagatgagtgacatcaaaactaagggaaaagactatgttgagccacaacttgagaatatcaaagagcaatttgttcccttaaagatatgggcaagttttaaactgtatttcttttatcttttgaatatttcaattcataagcctaactcaaaacttggatttgcaggctgagaatatgtcaagaaagtggcatatggaaagggatgatgttaagcagaagactatcataaaggagctgtcaaaaatttggggtgcaaaaagaacagattgagatctacaattttatttgttttccttttactttagttgctttggaaatagtggcatggacatccaaacataggtaatttggatgaagtatgtctctggcgattcttatggccgtatatgttgaagcatgcaggagagtaaaaataatgcaaaatagtgtgtatgtcaataattcagatagtaataaattgcggaatatggttgttttggttaattcaacaattctttttttgtttcttcaagcagactagacatattgttaaggttctgaaaaccatgatctgttgtaacaagatgacttttggcaacgtgagatcaatatctaacatggttggtagtaaaatttaatagaatcaattttgcattcaaaattatgactttagccacatgatggaaataactcgcttaagacaatatcaattactattgttcttttaattatatccttacttttatttaaatatttatacactacatataaatgaaagcatagttaagattaatttaggaagctaaaaataattttgatataaattaatagatttagataaaacaaacagaggaagcattgcttcttgaagatgttataaggatgagatgactaagagttagtttgtttaaattaaaaaaaaaatgaacaaaatacttttttagaaattgttattttagaaatagattgaatttacttcttgaaaaaaaaaattacctttttaagtaaaaatgatttaaacaaactaaaaaaaatgcttattttatttaaaaaacattattttaacaaataagtttaaaatggaccctatatcaaagaaagttctgaattcactaaacatattaatgataattaagtaattgtcgttataatccaccatttaagtgccgtaaggaatgctgtatgctgctattgatgttgtttatcgtggaaaaacgtagacacaccatctcgttatacataaagttattgtttataatcacttttcatagaaagttgtaaaactcaaatttttatagactaatgcctgtttatttattaaattgatggtgttaacatactgctcactaaggattttgatgaaacgtattataaacatctcattttattggggacggaaaacacattgttgaaatgataagctagaaagtatagatatgacgtttcttgcaagcctaatatattagtgatttgatttggtgctctctttacatgctacgttttggaacaccgtaccctatggacaatttagatgatatatctcggacttaaaactacttttcatttatgtcacctcacttgatgttgaagtggtaaaaatgaatcaaaacttcacgtttcaattgaagatcaagaacgaatgagatgaagagtaaatcttgagaagaaccacaagaaattggatgtgagggaaaaaccaattatgccaccacatcatctctattttgtaggtttatttgaatcatatgtaaaagtagttactataacttgtaatcaagaccagctccatatttccaagcctcgagatgccgcttccactggaaactcgtcttggatggtaatgtatttaaaaatggccttgcaatacatagaacatgcgcatagaatataagggtgtgttagttggacctatatgcttgttgaataagtaaagaagctaataagtggtttagaaggactttgtaaagacttttacctcacaataggatcagcaaaggtcgataaaaaggtgtagtagccaagccccagaaaatgtctggaccaatcaagaagtacaggaataccaacctggaaaaagataaaatgctaaatcctctatattgaaaaggttgtttcactaattatttatgctgtatatttttattgacctccaactagttgttagatgtttgtttgtccaattaaatgacataagaaactaagagatgaacatataaattatgttacgagctatgtctgtcaaagccgcacaaacatgttggaagagattttttttcagtttttaggtatttattcatctttacacagtcttgaaatgaaaaaaggaaataagttactgatagctaaactcatgaatacctgtttgaatatggatgggagtattttaggatttgttaacataaccaggcccaatgtcttggaaagtggaccaaactgtacaacatcctgcaataaaaaatggataattcctcaggacagtcattgttccaggtttgaaatttgatattggtttggttctcatctcaattaaatgaatattttgggaagaacatctcacaaatacaaagcaaaaaacatatccagagtttcagacagggacaagaagtccacctgtagaaatggtcggagcactggatcaccaagcctctgcagaagtgatagataaaatagaagtaacagtaagtaagaaagaataaaattataatctgagtcatgagagaaataaactacctgcatacaactaaaattggtataaagaagttcattaataaaatctgcgggaacattggactgtttctttgctgacattgctctttggaacaaccatgaagcactcaagttgggctgcattatacacaatattggccaggtatttagtttcatctacagttgctgaaacagtctttagagaagttggaaagtaccatgtaaggattcagcagtgacaagctgtatgagtcaagataatcaccattgattgcttcatgtattccttcattgtaataaagtgaaaaaaaggaagggaaaaaaaaaagaatcagattatctcaacaatgtgcctattttttgttgatagctgttacttgtttgaacaacttcctaaatctgtttcagccacattatattttactgaactaggttgttccaatgtagctgaaaacagaagacaaggtaaagaaaaatggaggtggggagttcactcaatactcagaaaaactaacagattcatagtttcatgtctcacagataaaacataaataaaactatgaaactaaaaataaaaaaacctcctgttccacaacattgcaatagatctgcttcaactagttcaaaagtatacattagaagtttgaaatttcaccgaaaggcttaccagctgacagtctccccaggtgcctggtcaagcttccaaatccaccaaatgaaacaggtgattgtatgccactagcatcaccaaactacagagaatgaagcttcattactttaatattagttgatagatcatagatggcttaattttatagaggcttcataagtgtaaaacgtaatttacctgtaaaactctactaaaagcagctggtagcggactgctaggtgctccatttcatcaaacattgtacagttattaaacaaacgataggtaaagataaaagtaagaggaaacaaaataactttaaaacgaacttgggaaatagcagatgttaggtagagacagaggacacataaagttgaaagataattttctgatgtgcaattaaatgttggacggttcacttatttccactcaatggagtagtgccatctggcagtgacaggttagccaaagaaacatttgaaaatttcgaagtgagacattatgaaacaggcatgaggaagttccacttatttagtagcttccacagtgagttgccatgcacaacacatggttcaaatctttaaatgaattatgtgttttaacttatagtattcaaatctttaaggtcaaactactggctgactggctgtattgctttcaggtgtcaatcttaagtgaagcaagaactttcagtcagagaaaacaaattgtgtgtgtgtgtgtgataagacagtaatggggagcctattgtagaacttatcaactgatttgtacatacatcttctaatacaaattaatacctctcgcgatatgtgggaaagattccataaataactctcagtatctccaaattgtcaagtgaaacaccctaaacgaagttgcaaattgacatcagtcaagctgagagcagtagaacatcagtatagaagaatgcatcaggtcaaatatagacgttttggttacttatatgatttcaaaaagtaatatttgaagagtgtaaaactttatcagttagcataatcatgacagaactgattgcatagatactctttaaataaacagagataaaagacaaggataatatgatgtacataactggaattgattagtaacataacaccaaggtaatcacaaacagttttgtgacttgataattcatacacagactggcattttcaagcttctagtttggctgttaagaacaggacattgaataaaaagatctttttacttcaaatcttagtttttccatagaaaaagaatttttattagagaaaagaaaggaagcacagacaaggggaggataaatatgtcctccaaaatgaaaaaaataaaaataataaaaagtcgagccatcagagaacacaatgaagaaaataaaactagcctgatattctggcatcaaatcccagtacgcttctaataattcttccaattttggggatccaggttgaggttccacataagtgaacatataagtagtacggtccaaaggacctgagcctgctggaaatgcctgtgaagatttcagttgaagttcttaaaaatagagatggggatctgtgtttctattgacatagtaagagttacctcccaaaataattgtgcttttgaatctccaactttctttattgatgaactgctgaatatgacatcactagtggaatttgtttcaaagccacgtgcacatgttccaacaacaaggcaaacaccatcaggcttcctcccacctcttatctgtaaaatcattgaacatgacacttggaagaagcttcaggaaaaggttttaatttttatattcagtaggtacttatctatctttcattaaatcaagttagcatatgtagaactttaatgaatagaaactttctttatattctcaatggagtaatcagtctcattctggttggtgatgattcaatcaataatactggatgaaagataccattattttcctatcctcccagtctcataatcatttaggaatttagttggctaattacttatttaacagatattgcatcacttgcatttgcatgcatattaaatgatcttgcacgtacatatattagtcaatgtgtcctacatatgcaggatagaacacacaacagaagacctttatgttgtctcactcgaagacaatcacccttacaaagataaacaaaggagaacatataaatgacagccagagcctgtataacgtgataacatgatgaaaggagaaaacatcctagtgatcacatgatgaaaatcatgaactgtctgtaagaatacaacaatgaatgaaaatatattcctgacctgttttacgacaggggagaagtttcccatggcatcaattataagacgtgatgacaatattttgtccccagaaagtttcagaacctggaaaaaaatacatgcattcatgcttctttatcatcaaataaaataaacttatcattcttcagtcccatagttaaatggtactttaaaatttccatttcaatgctaggttcatgtatgatatgtttgcatgcttcactgtcgcacttcaatctactgtgcaactttttttctggtacagtaactttctttatataaccctttgatgcttacctctagttaggtggtgtttgtaaatgcgaatatatatgcagaaattcaacatataaaattctgtatcggctgcatggcctttaataaactaacacttgtgatggttttttcaccaagtaagggccttttttatttttaattaccaagtgggggtaggttttaaaaaaattaccgtttaggggtaaatcgtaccatgtggcatgactttttttttaattatttttaaaaaaattgcactcagaagtcgtgaaagtgggtacgactttaaagtcgtaaccacatttaccaattctaggctacgtttcatttttatttttgtatttttgtttgcgaccacaacattcagtcgcaaaaatttttagttactgaaatagcgaccgaaattagcacgttgcataataaaaaaaactaaaaaactaaaaacaaaaatgaaacatagcttagaagttgtaaatgtgatgacgactttaaagtcgtaaccacttttacgacttctgagtgcaatttttttaaaaaaaaaaaaaaaaatcatgtcacgtgacatgacttataagtttgaagcccccgcttgatgaaaaaggcctgcactagaataactagttctaaaagttaaggtaaactcactgcaacatcctcatatacattaatgcaggagacgccacacccctcaaaaatgactccacctagggagataaaccgtgactttacaatctctataagctttgcaggtctgcaattgcaaatagcaaaaatgagtatgattttcaacagaataatgaattttatactcaaattacataattgtaaactccgcgcctatagtaaaaataaaatgcatgtttctgagagccaagtccagataatattcaaaattgtgtgcaatagtactaatggaagcgcattcatcataataattcaagtttttttttcatctgcttgccatttcttagtaattctatatccagtttgctacagcagatttcctgtcctctcttgaaggaattacacaaaatacaacaattaagtacgtgatcaaattagctcattttgtatttaaaatagatttagattataatcgaagtcttaattagaaagattttgaataaagaagtgatttttctccaaaaaaataaataattcaaacatgcactaaattaaagcaactgtgaccgcatattgttcattgccaagccagacaaaaaataaaagaaaaatattaactagataagaacaaagattaaattattcattcataattgaaatagaagaaaacaattattatatttctttacaggtatatcgaattagtttatgggaaggagactcacaaaacaccgagattaagtatgtcgttgacccatatatcccctttcctttcaaatccacatctgttctgcatagttcatgaaattgccaaagtgaagttagtgaaaaataaattaaagggaagagtaggagccataaatcctagagaggttacaagagaagacatggcttgaaggaaacatttgagacatagatatgccatttgtgatacagcttttttgcctataggagaaacaaactattggtgattgaatgttctttgaggaacaaaaaacaatcaagcagtttggaaattacattgaagcactgaacttaatacttcttaatatgtaagcaatggtcatgttgtgagaactcaaaacttacatgaaaaatcagaaattcttaatttttaagcacaatgaaaaaaaaatgaatgaattgaaataggatgaaaataattcaatgattcaatcttaagtatgtaattgtaatataaaaatcgcattctttaattacttcaaagacacacatgtataacacaagaaagtatcgtgaattaatattcatggaggatattaataataaaacattaatctaaccgtaacaaaagtcagagtaagactgccagggtacacgtatttcatttttctctaccttgtaagcttgaatgagtttctcttttataagtttttatacaaaattaaacactgttgggtcttttctcttgggattgacaactaaatttactgttactaagtagaaaacatgctaattttttgtactgtttgataatatcccttggttgttagataacttcatcttgcagtgctctatgaattttgtcatttctttgtaacaaacaagacctcattgtttagggatgtgaatgatgtgatgtatgttcaaagtgacttgaagacagttatggagaaatacctattcttgctacatattgattggaaactaaactgaagaagttcaggaattacaggattgaattttactgctgtggctctttcaatgtcatcttcttccaggactccaacttctactagttccgaaagctccttagttgatatattccattcttgctctctctaatgatcaaaataacacagacaactcaaaattgatccgacccttcaaagaatttatcgactcttttctgagtaggattgaatgctgatatctcagtcaatgaaactgaaattaccccttttagcacatttctttccacaatggcaactcgaagacccctagcacacaaggccgtggcaatgaagatccccagagtgcctccacacactaacacatcgtatgatccctctgctttgtcagcaagatcagatgagccaaacaagcctgggatggtagagacaacttgctgaggctcttgcacaactgcaatgcatacataagaagattacaaaaatataaaatagtctcatttcctaaagggtataagaatcattgaatgacatgaaccttcttgagaggagcatatgcttgaccatagctggtctaatcttttcaaggcttcatatgagtatgctccaccagcaccaccaacttctccactcactgaaacactctccattatcatctataaaagtaaaagaaatgagtttaattttggtacacttttagtggaaaaatatttttgtgtcaacaaactagaaaacaccttaaatatgactaattattacaaaagtcaataattttatcatagatggtgatccatgattgaatgttagtgtagaaaccttaacactatcatgcattacaattaaattaaaaataaaatgtcatcatctttatttggacttgttacatagaaaacacaacgtggcatgacacagtgaagaattggtacctgggttctggagggaacagcttgtgatctcaaaaggaggggtcttcggctaaatttcttgtgtgggaatgaagtccccaccgagagctgagatattccattaatgggttgaagccgaagaattaacataacaaatgaagctcaaaaatttagataaacaagagagtaatcgaagtaaagcaagcaactgtttttttctcgattctctgtttgatttatcaattatcattatcagatttgaaaagggcaacaaatttgcgcaccacaagtggacacgttcaaccaccaaaactgtctgtgtcctttccttccctatatttctcttctatttttcacttaattagattagatatgtctaagttactcccctagatatctttgttagatatgatatgagaagtaatattaaattattaatgggatatcgtgaaaataaataaataatctatataaacttttttagattaattagaattttaattaattttaaaaacaataatatttttattttatttttaatataaaacttattaattttcaatattttgtttgttttatgaaaatttatttacttattaagaaattaaaataaaaaagagagaatttttcattttcctccttccatttcaatgtgggagaaggtttttttttttatttcacaacaaaaaaaaatacatttatatttcctcttttgaacaaataataataaaaatttggtatttctattttattttattttcttatttgcttgcttcctatttcatatgttttacatgatcacatttgaaaaaaatatattaataatatgagttttaatactttttgttaacatattttcatgaaatatttgtaggtcgtattaaatgcatatagttgtgtgggcaacagagtggcactccactgttactacttaataaaggtttcaactttgaggataaacctcaccggttcttacagggtttatcgtttaacggttgaaacgaagcgaaacctccaactgcatcttcaaccctgcgcttcttttcaaccgataaaaacttcgatcatttttttttctgctctttagtcggtgttcatttcaattcagaagtcaaaacatcggagctcatcaagtatgttaatcactttcctcgcattcacgaattgggtcttgaccaaaccctaattagaaaactagtgtttttacatttgtaattgattggtgtgctttggaaactgaagattttttttatgtgcattaagtgtatgatatctcctctgagtgaatgacaatgaggacttaaaacaaccggaagtgaacattgatgattttctgaacttcaattgttattcatttttctggtccatttccattccattgttgtgggtttcaaagtgtgtaggtactaggtaaggtaagcctcacccttcaaaatttcaagaaaaataaagtaggaaacttgtttccttttctagccatatctgatggaaacagacacagcacaacacacaaataaaacaaacaaacccacatagggaagcataactacacgtgctactatggaatcaacggaaggctatgttatagtgtcagtttttccccctttgcagttaaaaattaactgagattactcatggtaatttaagagagaaatgtgttggttggttcctgttggaacttttattcaatgctcatcattaaaattggaagtctttgaatttcttgaaacctttcttgcagatttgtgctagtttgcaagtgaagctcatttattgtaaactgttaacaggcatggcaagcttgttgacaacattagccattacctattctcctgtcaacaatggttccaggggtttcagaaagtcagttaatgcttctaaaggaaggtgctgcataaaagcaatgaggatagagaaatccttggaggaattgtacaatgtgaaggtggaaagaaaagttcctcctgagagactagccgagcttggagtttcaaaatggtcagtgtggaagactgggaaaagcaggttgccttgggactggcaggtagaccaactggtgtacatagaagaaggggaagtgagagttgtgcctgaaggaagcgagcgtttcatgcaatttgtggccggagacttggtccagtacccaaagtggcttgaagctgacctctggttcaatggttcatatcaagaacgttatagttttcgagcatatggtgatgatcattgatgagaagatgatgcttggtaaccatttaaaagtaacatgcacatcttatttggatgttttatgcaatagatgttttttaaagttctagttttccagttctaaatgtattaccaatatttttgaatgtttgtgatactttgccatcatttaaaagaaatagtcctaaatgcttctgttgtatccttttcatgttctgcctctgcaaggcaagacttcccgataagttcatatcgaccaacttcatatttttgtcttccaagtaggatgtaaaatcacaaatgtccataatccaaagtggaacatttaactctgcagtaagtgcatcatagtgttacgcacacagattcaatttgttttttacagccttctataaaaatattaaaaaaaatgcagactagtacaagaaacgtctcgttataaacgtaagagcacaagaaatatctcgttataaacatcagagcaaacgtattcatttggaaaggaggcatagatcccaaagaacccaacccacaaaggttaagtaataaataagaaaaggtccaatgaaaagcacaaactccgaacgtgtaatgacccccctctagaaagaaaaaaaaattggatccactgtgacaagcagttcagccagcgaagaacaaataactgccagagggaacaatgggttcagatctttttctgcaaaaggctaaaagaaatagaaattttactaatgttaaaattacataaatatggcaaaagaaaaggattgtttttgtatcactgcataatctcaatggctagacttctaaataaacactgcctattataaactacattccttatgatacatagtacaacccatgattccagaacagatgatggagacgaaaaagcccagaaacaaggagcagcctgatatccacatcaaccccattcacctttgttcctcatcatgtggtcagaacaaacaatttggatctctgatggctctcaaccacctgcagttgccaattgattcgcactggtagcaattgcaacagaggacacaaaccttgagacaaggatggcctcattgcttactgaattagctgcagcaacatcttccagttgtttccatatggattctcgctttttttgcttctccctattcttgatttcttcttcttggaatctcttcaagcattcatcaaaaagtgcctggtcagcatcagagaatatttttctaacattcatggtcaagctctgaacagcttgattccaatggtcccgtatatttttctccatagcaggaaagattataggcagtatcactttgctgttttgtaagatcaaatttcgaatatgatcattgttccacagaaacagtgctcgttcagctacctgccaacaaaatcaagtcaacatcaaatctaattctttgagactgattccagataataaaactaaagtatgttgtattgtagaactgcagcttgtaacacagaacacaaatctacaaaatctttagttgtacaaatacaagttctaacataaaagacaaccatattaaatattttgttgttcaactttcaagcaaaatccaataatcatttcatatgaaattatgaataaatatcaaatttctgagatttaacataaaagaaaaccatatatagtatatcgttggcaacataagtccaactttcaagcaaaattgaataatcaatgaaattatgaattgacataaaatttgtgagatttaaactattatttcataaggcataaataagatatccaaataataatgaaaggaagaaggaatgtcgagtcacaacatctttatgaaaaaagttcagcagtgccacatctgaacccaactccaaaaaaagaaaaaaaaaaaaaaagagtaaaaacactaactaccactgaagtttcatgatattagacaaacaccccttcctctttctactcctacactaatctcccttagttatttaaaaatatacattgcatccccttatacattacattaacccccttaagttatttaaaagtataaactggaacccccttaattgtttgaaaaatatcacatcaggctctcctaaagggaaattactgtaaatgttaaaaaaacgggagatttgtgtaattatacaaaacctcaggtggattatgaaatttactcaaaagaaaaagaaatggcaatgaaaaaaaggcaatgctaatgtaacatagtttggctttctagtatcaatacaagtgcgctgatctgatggttgagctccttacatttgttaaattgattgcggtttcgacaagtaatcatcacatattagagaaatagaatgatagcatctaagatagctaagacaagcaaagtgggaatggaaatgaaatagaaatagagatagagagcggtggtcacaggtgttagtaaataatgctaataaaatgaatgcagacagaatatatcacaaatgaaaaaataaatatgggggaattttgtaagcacctgaaagtgtaagctattaaggcatctaccaatttgacgaaatagtgggatcacacatcgctgaaattctgctgcttgagttgcctctaaaacttcctccaactcactaaggaacattacctcctttgcactattagttatcggccaatatttcaaaaggcctcttaccacagtatcagctagtttgacgtccttctcaacaaactgagtaatgcaataagaaagctgttgatgataaagtgcaacacacttaggcttgtgaagcgggatcaatgcacgggccagaaacagcttatgctcttccttcaaaggcaaagcaaaaccattaattatgctgcccaatatttcaagcaactctgcaatcccactgtgtttctctgtctcaaatatgaacctgtaaaagatattgttgatagcttttctaatgaatggccgatgcaccatgaacttcccataaatgcggtggaggatagtcttcaggtaatccctctctctttggtcttccgagtcaaaaaggtcaagcagcctcaacacaaacgaatgatcaatgtatcttttagcaagcttagcatccgtctcagttgaagccacaaatctaaagagaaattcatagacaatctgcagatgaggccacgctggttccaaaacagtttcctcttcgtcaggctcacccatgtctgccaaccttccatcatgattggaagaaggcagagcgcgaaataaattggttgccaccatcttggtcatctcctgcatcgcaaactcgttgaacttcgaattcacagacgaaacataatcaacaagctcaagtagagtttgccgcttcacgtccttctctttgagatgcttggcaggatcgttgaaatcaaacacaacacagcacaaattcaactttctaataaaaagattctgcttctccgagctaggaacatccctgaaactaggcaaagcctcataagctgcagaagccattactgaacctgtagtaggagctaatttcttagattggtttgaatggtgttgagcaatagtctcattcccagaacgagacccaactgaaccagaacttgaagattttgaagaaactgaattggatttcaagagggtattagaagatgagttcagtgagaaaccatcattgaaccctccttccccgtttgaattattgtgagatgattttgagggtttgcgaggtattttaccgaatatctgtttaatcatatctagaaaaaacccaaccccaactatctacaaaagaatcaaactttcacaacctcgatcaataacattatcgaaaacaagtaacgaaacacgtgggagggtgcgatttaagcacacccaaataccctaatccaaaacccataccacgaaaaacatcagtgaaatttgtactcataaattcacggattgtgggtgcatgagctagggcgtgaagaaattgacggaatgaagaagtggaaagaacttacattgagaataagagtgagaagatgctacgagagtggaagaaaatgcaagaaaaatagagagtgaagttaaaaagagagaatttggtcacaggaaattagccctagtgagagaaagctgatgatgtacgtggcccaattttgatatttgaattttattattttttattttttataagagaaaagtcagtcacacgttctcttgtatgctcttttaaatatatatttttattgtcctaaaaacatacatttttattattaattaaattgaaatttataattttttatgaatctcactttttatttaattattttttaattttattaaatttaatcaataataaaatatgctttttacagaataataatttaagtagtattttaatatgtgtattgtcttaaataaatatttatttctatacaattgaaatttatgataagttaatgttttatttacgtacataagttttatcaaattaaatgaattatatcgaagaattaatttcttactctctacccaatgggtttatctaaaaagttttatcaaattatataatattaaaaaataaaactttgttttgtttccaacagggagcagtcttatgaagatcctattgaagagtaaagtagttgtttcagtttgtgtttccacatttttgttcaaatagcttacttctatgtagtttgaccctaatgctagagctatttctttcagattgttgtatgcagtttttgtagtttcaaatgaaaatgtaacagttagggacttggcaacaaccctacaggctgatttgtcccagttgcaagctgctgctgcttttttgtgtcgattgggatgggcaacaaaagtacttgatccagaatctattattggagattcaactatagttactatacttgcatctcctgttgcaagtacaactagtgatgaagatgcttttgttgctagtcaaaattatgagaatactctttgctaatgactccattcaacaaggggatgcttcagcttcaggaaacaatggacctcgttcttcctacacttgtgttgctttcatagttgatgctaatattacatcctatcttatgatgggatctgtttcaccaggtttatacccttcactcttagccttttcaagcttaaattatttcctgtagttttatttttttaaatagttattattattcttaaaggcgacttggataaatttctctacaaatactaagaagaaaataaaattttgactactcatgacgacttgttacttaataatatttctgaaactttgatttttaaccctgctgaatgacgtcgtgtgatccatgtagtcgatctcaactagtgggataaggctttgttgttgtattatgacttcttgtgtgtctcaaaattggtttttgcgtttgactaaattatacttcttgccaaactttgcaggcctgaaatctcatgctgttacacactatgaagcagggaaattgggttatggcagcattgctgatctttgcaaggatcttagtaccttggagggtgcaacatatgagggagaattacaggaatttgctaaccattatttagtctacgttgtgtcttagagtgtctacaatcaggttgactatttaccagcataaaagaagagggaagttctgataagctgattacctcaagtaatgatgggccaagttctgagatagctgaaagttctttggttgataaatcaggagactgtagtgttttagaaactgtgataaataatgaggatctaataaattctgattcatagaagcttgtggaggcttctatatacaccgaccgtgttcctagtggaatagatgatgaaactcgttccattactttggaggatagcagtgatcacattcacgaagctgacaaggcacacacaaaatttgattgtaatgagaaactagcagtatttgaaagttcagatgttaagacaggaatgctaaaaaggaaaatgaaatatcgtgtagacgttcttcgctatgaaagtttggcttctcttgcaccagcaactcttgatcatttgtttcttcgcgactatggtatacttgtgtccatagtgcctcttcctcattcaacaattcttcctagacatcagtagttcattttggtcctcccacatattcttctgagtccttggatgaaattggttttatactcaactgcaggtagtggccctctatcagttgttctgatgaaaggacagtgcctgcgcttgcttcctgcgccattggcttgttgtgagaaatcccttatatggtcttgggatggttccacaataggagggttacaaaggaagcttgaaggaaatttagtgaagggaagtatcctcttgcagtgcttaaattcacttcttaaacattcagctgtgttggtgctgcctcttagtagatgtgatcttaatgaatatggaaaattgattactttggatatccctttgcccatgaagaatgccgatggatcaattccctctgtaggaaaagagttaggactaaatgaagaggaagattctaagttgaattctttattgaccaatttggccaacaaaatgaaattgtggactgttggttatattagactattgaaattatttaatggaacaaaatcagaccaattttattcaaaagagaaatatgaatgggtgccattgagtgaggaatttggaatgccattatttagtccaacgttgtgcattagtatatgtagaaggatagtttcatcagagttgcttcaatctggctcatttggtgaacactatgatgaaatgcaaaacttaaggaaaaaattgcatgatatttgtgatgggtaccaagcaacaggtcccattacaaagcttctttaccagaaagagcaagcttttggacaatttatggaccctgccaatggaagatggaattcactagtggatctttctcccatttctggcgcattaagtgtgcgccagagattaaaacttgttaatcgacaacattgccaaaatgaagttttgagctgtgatggcaattttcttagttttgttgctaaatttctatcaattctatgcttaaaggttcttaatttttgttagataaagttctattaccaatatcttggcaaacaataatcaaaaagatatttttctgtatgactcacaatcttgatttcctaatcatcccaagtctactattaaatggtgcatgcagatcatacacattacttcctgctcatgaagctgccacaaaaccaattaaagaatcccttgaagccgttacaaccaatacgataaaaactgaaccagaagaaaatgatagtaaagaagcaatccttcctggagttaatcttattttttatggttctaggttgcttccatttgatataggtgcttgtctccaagctcgccaacctatatccttgataatagatgcagctgctgcctcaacatatgcacattcaaatagtcatgaagtcattaatccttataggttattacacttcagatgcaattacactgtctaacttgagcttaggttgaaggtaaaggttcatttctttttggttgttgtttgtgtgttttaccttttcagtgcacttctatggattttgtaagcattactatttaaataatgcatgttgtttctgtttcagattttgctagatcaagagattcaacattattctagagctgtgaaaactgaaaagaggaaataccaaacaatccttaaacaatgtatatatgataggattttttttcttttgctcctgtcacatgtagtaagaaggacatgaagtcacctttggctcaaatttcagcaaaacatagccatgggaaattcttttacagtctcacataatatgaactaattgtcttttacttcagtggcttccttatggtccatgtgtaatatcgatctattgtcttatgtttgatcttgtaagccaattaagggataccatatatgattgtaaaatacaacatgtaactaataacgataaattaccggtgtcagacatgtggttggatgattagtcttctttagatgcaaagtctttcattcaattataatatatgaaaacatcatattttataatatcttaaattatttttttaattttagttttcagatttagtttttctgcagtaaaaaaattataatgtaaaaaggtgaggtcttcctttaatttaaatccaggagacatcttagataagtctcagcccatataattgaaaaagtcaaattatatggtcataattcacaaacattaccgaaaaacacaccaaaagtcatatagattgtcacaataattacttgtaataaatgagagcaaaaattgtgagaaaattaaaataaaaaaaaatgcttttcacgaattttttttttttaaacaattctattcagaatattgtccaacattaaatatagaaacatctctcaatgaaaatttgacccttaattaatcacgtagtgggaagactagtcctaaaaaacatttatttttataaaactaaattttataaaaataaatgttttaaacatataaattatattttaaatttatgataaaaaaagttatatgtgatacaatatttcttttaattattgctattttctttaaaaatttattgaaattcaatttattgaaattcaatttaaaaataaagatggaaatgatagattaaaacttaaaaaagataaataaataaatcaaatatcaaaataactcttagaaattattgttggaaggactattttattatcctcgggatgtgagtaattcttaggattaatatcatagtcattcaacatgttatccctcataaatcattcttaaaaaaaaatctcacttaagatatgggtaatatatttttattttgtataatttaaaaaaaaaaatagctgcgttaatgaagattgataatttgataagagatgatttgggttcccaaacagtccacgcaaggtacccgttgtggcctgtgggagtagaagaaataaagcgaaaactgaaaagtgtagaaaacggcgtcgtacgtatgattgcgtggcaagtgaggtagcgtgtgtgtgtattatatatatatacaacgtaggacattgtaaaagactctgaagtgtgaagtgtgaagtgtgaagtgtgcgtgagaaagaaacagagtgaagagaaaggaaaaaaagatggaaggagagaaagagaatcccgatggtaacgcagctttggtgaactccttctgtgaaatcacttcctcttccaaacaagaagcccttttctttttggagagccacaatttcgacctagacgccgccgtttcgactttcctcgacaacgccaacaaccctctcatccctcaaaacgacgacgtcgtcgtcgctgcaaacccaaaccccaactccgtttcccctccctccgattctcactccccggacttcaacccttcgaggtctccgtctccgaatcgcacgccctacgagctccgatcccgcaggtctatcggcaagaaaccctccaccagccgccaaggcaaaattcgcaccgtcggcgatctcaaacgctcctcccgcgatgatgattcagattccgatcccgatttcgaacccgacgagtactacaccggcggcgaaaagaggtatccatgtaaattgatcatattaattgttggaaagtcgccttaattgcaatcacccctggcccaccttagttgtggcggctagcctggtacatgaggtatgctagagatttcacatctgactagtgatatgaccaaaatagaatatacaagtgagagacaacctgttgagttaggtccaaatccatattctaagactacgattgtgagataataagatccgatgtggcttttttcgttgtaatgtgtttatatatttgatgctacatgcagtgggatgcttgttcgagatcctaccagaggaaacagcaacaacaacaatgtggatgatatctttgatcaagcgaggcaggttgctgttgatgcacctccggagaatcctcgaagctcgtcgaggtcgacaagttttagtggcacggcgaggttgctctctggagagagattgccatctgctgctgctgctcctcagcgtgtagaggaagttacccacactgtcactttttggaggaatgggttctctgtcaatgatggtcctctacggaggttggatgatccgcaaaacgcaccttttctggaggtagtttgccattacttttgcttccaaaagctcttgttcgtaggcttttatccatatcttatgtttatcttctgaggatgtatgtgcatttggggaaatagtttaattaagtatgtttattaaattaggatatgtttgcataaattttttctataagccgattcataggagaaggaaataaaaaaggaaaaataagaattttaaatttttgttatacataagtttttaagaagaggttggtgatagtgattttggctgcaacatcaaggtttcttgaagtgtatgtggccgcaattgtgaccgcatttgttgcaactttccacaatatcatgaaaattgatgaaaccacagccgcaatttaaaacctcgtgcataagtttatttattgaacttctctcatttaacttctccaaaaatcgatttggacttgtgctgttgggcatgagctaatcttaacttattagagaagtttaattcattttatcttcttttttttctcttctcctatgaatgtctgttgaaaagtttatccagataggatttaagtgcttatcaaataagcacttatgtatacgttataagcttattgaatgaaagataaaatagggctagcttgttttcttataagttgaataacgtattgaaataagcttacaagtttttttaaaaaaagttcatgaacatgtcaagctatttttatgagctctttcaaatatttatacaagttctcatgtcataaaataagcttaaataaactctttcaagtacactaaagttactactgctttcagcactgcaacgtgtgaaagctgtcccaatatagagcatgctaatcatttgtttacctcaatatagagcataaagaagtccgaatgtcccaaagaacttgagccagaagataggaggactgctgtccatgtcaacctcacaaggcgggatgaagactaccctgtattcccttttctattttttagttttttgcatctatctatcatcctattttaaggtttttaccatttctttttcctttcggcaaaatttatgcaggaaccagtgaagccacgccaacgtggtttccagggtgttggaagaactttaggtagcaccagctccagcaatgatgaacctattcaaacaaccggtgcttcaccaagtactgctccattgccaacaatgggtttagttgtagatgagtcgcagtcagtgacatcaatccagctgaggttggctgatggcacacgcatggtttctcgcttcaatcaccaccatacaatcagagatgttcgagcattcattgatgcatcaagacccgggggtgtaagaagttaccaactgcagtcaatgggttttcctcccaaacaactcgctgatttggaccagactatagaacaagctggtatagccaactcagttgtcatccaaaagttgtaggttatttaccagattctattttcagtcgacttgaaattactatttttatgcttaaacattgattgatctacttatattttattagtgaatttgataaaaatgttcattgttagtagattccttatcccaaatttgcttttataagagaaatgttgcgtgaatggagaaaaaattactaggaaaattagtgcctaaaactttgttcggccacaatcaccccgtaaggtagttgaaaactgcagttggtttttaacataattcgtgaaaaagggtggaaaaagcctgaaagtagattatgtaatttacaaataaagaccatgggaaaaacactaaacagtatgtaaaaggcccagaaacaggtgtaccccagcgcattgcgcagggtgatgtgtagttcaacttatgttttggttaagtgattttaagaaatcgatttttacattctaattgttttttctttcttcaatgattcccaaataaaatacaagaaaaatgaaatcaattgttgatatgttgtaaacattttttgaattactatctgcgtcaatgtattctgacttcttaatttcatgtgaaaggattatatatgggctctatcaaaatctgtactattttggtagaaatcaaaatctgtattttaagcatatgaataaacatacaaaatatttttttaattgctagagtttttattttgttacaaaattaacagatctattatttttattactttttcttattgaacaataatggtggttgcatttcttataggttatagcacttttttctttggtatgtttagttaatgaaagaaattgaaaggaaagttttaagttgttaagtagaaataaactgaaaggaatatatatatatatatatatatatatatggaatgatcaaattatactattataattttgataattattatatcatttttataaattaatataagatgtgattcttatttatttaaccattaaattatatttatatattatcaagattatatgtgttaaattttatcaaaatttaacaataagaagacaatcaaatgatttatattttattatattttaaaatgtttatattacattggttttaatttatatcaacgaagtaataaataattttggattaatataaaattttgcatatatgatacatgttaaaataattttcaatccaatggtaagtttgaagaaaacattattcaattgaaatttataaaataatgtaataattgttaaagttatatcgatgtaatttgatatatcttctctctctacatgtgtgtataaaatgacattcatattctaaataagtaataaaatgtgattgagatatttttgtcattctaattctaataataaaaaataaaaataaaaactatttccattacgttcaagccatttttttgagaccaacaagtcatcctagtgaaattgaatttaattttctgaaagaaagtttctaatttgaaccttgtggattaaaaaaatataattgaaagaaaaattacaatagtcaattaaattttcaggtagagattaattatcaagaaaattaatgaatattttatattggtggaaaaaaaaattcatttgtgagctgaatctaaaatgaccctacctctcatttgtataatctcctctcctttgttcgctggccaaaaaaagaaatatatgaattacaataaaagttatttagtgcctccattactctctttgatctatagtatcaagagacacttgtatcttcaagaggtatatatttcttttttttttttttggggggggggggtgttaaattgtaattctatgtttcttattaggatcataacttttattatcttcaatgtgaaaattcatgaggttttattatctccaattaagttccgcatcctaattttgatatccgactcattgtgccgtgcaccagtattatctggttaaagtgtaaatagttgataaacagtgttaagtagttgccaaggatgttatgtctataggaaaaacttgttagatcaatacctcataattgtttgacaagcaatttcaagtagacaatacaaaggaggaatgaaaacgacaatacaaaggctttgatattccacaactcaagtagagcaatggcctgtttggtgaaggagcatattttagtcctatttcatgatatttttggatggaagtcaaatcatatgaaacccacgaaaagtcattcctctcctttatttctactcaaaataaaatagtggaagacatttatttttacccttctttcttcctctcaatttccctccaaacagagtgtaagtgatcaaagtattaaagacaaaaagagacgaagatagcgaacaattgaatgaatatgaaaagaagtggatgatttttgtacgaattctatccatgtgaatattacaaaatgacgtaatattaacttttatttactttctggtatatttttagctatttcgtgttttctcttctcatccaatgattggttgcaaattcattcgtgtggctttcataccaaactgttcagacggaatatcacaactcctaggcataaaataagagtggaaagagtttgacatattttctattctgttggtcaacgttttttttttgtcaactactacctctctaagaaattccagaaatgtttttccaaaattatgttagcactccgcaaaacaacagttattccggaaatgctttaatggaattatgttagcacaattccaaaaaatataactttttcccaaaattgagtatgggtgagtggtcgcacatgcacatgtgggtgatgaatgggttgggatttgattgcgccagaatgagatggctcagcacggcgttggccacgatgatgtttgggtggttcgtgggtggtgaatcttctggtgctatgggttaggtggtggtggctatggaagattttgagatgggaaggaaggacatatttgtccattcaagttttctatggggtgcatgaagcgaagaatgaggcgcagaaagtaaaaggcgagtttatcaccaaaaggcccagaaaaaaatgtttatcacaaaaataaaaataaaaccagatgtttaaaattatcatgtattggttgataattgatctgaaatataaccctttttacagattggacctcgagcctacaacaatttgatagcaagaatgttttgtcataaaaaataaaaattgatttttctaatagaaaaaagtgaagcatctacagtctaatcagctagtcattagtcattatattattttgttaacttttcattttttgagctgatgttctttttgcaacatcactgaatgtaaagaaaatgacaatctttttcattctaactgccccatgaagaaaatcttatttcatgaagcatagtaacatatatagatttagaagtcattatccaactcaatcacggagaaaccttcagggttactctctttgttattacgttgtttgtttgcattaaaattttaattttatatacgtaaaattaaaaaaaaaaatgacttataatttatatacgtaaaattttatacaagaagattaagtcattttatatactcgacttaatcttcttgtataattttaattttataagtcattttatacaagaagaataagccttgacatatataaattaacaagtcattaaaacttaagccttgacacataattttattttattaatttataagtcttaaatccaaaatcttgtacaagaagattaagtcgagtaaaagtccaacaatgacttattaattatcatattcttaaatacaagaaaaacgttctaacaccaaaataataataataaaaattaagaaagaaaatccttcagataaaagacacttcctttaaatggaatcgagatctccttaatttccttccgccttttatttatttattaagatatatacattattttgacactaaattctcgaatattgttatagtggtacaattgagagacatctcatgtagacataaacattcttatatatcatcaactatatatcgggaaaaaaagtatggatatcttttaattttcttaaaaacttaattgataaaatttgtcaatcatagggtacaagtggaacaagctactttatcatgtctgtaaatagtaaatcatacgttatttacagtaagttctaaagcaattatattattaaacgtatagggatatccgatccatgtcttggaattatagaatcctaattcttcttcgaagttgacattatgatatttcttagataaattcaccattgattctgtgcgattctgtggactacatggcattgcatggttggctaaggatagtaagtaaactccaccatatcattccgatgaggatgggacttagcagggtgatgaactcaccaccgacaaattaatgttttttattttaattatcatggaaatgacgtaaaatatttatcaatttttaatagattttttctcttaattataatttttttatcaacaaaacttaaactcaaaaatttacttaacaaaataatagtacccagttttacactatcaacaacatgttggttttaaaaaaataatgttttgtttaaattagaagtgaaatagatagaaaaaaaaagtaaaataaaaatatattgtttgaatttgaatggataaaaataaaaataacatacaaaaaattctctattttttataagcataaaaagagtgaaataaaaaattaaaaacgtaattttataaataataaacttaaataaaaaattatataattttttatattaattaaatatttttttactctactatttttaacacaaaataaattatttaattttaagaaattatatcactaaaaatttatttaactttttaaaaaataaaaagaaatgagagagagagagagagactccataaactctccgcaaatcatccatgtccgttgtccaacaaaggggtaaatatagaaaacaggagcatggtgggggtgaaagaaaagtaaatattctcttcttatttttttttaatatttagacattttaagtgattttttttgaatagattaaagaaatgagttatttttctaataatttattattatgtatacatggttagaaattaaatatctactgtcatgcttaaccgatgcaattatctactgtaatcttgtataaaagagtgatcaaatatttaaattattccaaaaattaactctgaaagggtttttttttttttatatctatcctttatttatttatttattcaaatacttatcctttatttaccaaaaaaaaatattatttagattcttttatcgtaaatttattagataaataaaaaaatagagatgagcattaactctttgatctaaagtcaacagtatcttaaaaaaagttattctttgatttcatcttccatcttctttatctaatagttaaatataatatatgtaattcaagtgggactgagcccaaatcccataagatctcaatttagagtctcgtaagatgaaaaatgtgattaaaaaaatatttataaacaataattaatctaacttttaataaaattaatatttaataaaattgatgaatatcattcgtcaatttcatgataacctagtaaaaaaaaagataagttattcgctagaatgatagattaaaaaaatgaaaaataaaaataaaaaataactctttattaaaatcattaaattaaaaaaataattaaaaataactattttagaataatttcatcttttttctgtatattatataatactgatatgaaatttgttgatcaaccattgaattataatcaaatattaccttcattattaataatttttagttaataaaatattaaaagaaaacatattttatattactttattcacgcacaagtattcatgaaaagagttaaatttaaatttataaaaaaataatatataacttcataaactcttttaattcatgaaaataatttttggtataatttgtcacaataattttttaaaatttttatattcaagtttataatataaaatttgtgtaataagatttaattaattaaattatttactcaaattcacttacaaaagtttctctctagaggtaacttaatttatatataataatttattataaaaagacaatatggagatttttttttggtgtataaggttgataaaatgagaacagaaaatttaatacaaattatttaaatttttgcaccattagattagcaccaatattatttattttatttaatagtcatataatcacaaataacactgaatactatttctggttctatttaaaagaaataagttatgatgcattttacattataacttgttttttataaataatattagagataatatatttataagataattattgtacagtataaaaaaagataatggctgtaaatgttctaaaaatatataagtattgtaaaaaataaatggtaatatgtggtgataatgtaaaaaatattttagactcttagtacaattttgtttttgctatataaataaatattgtattataagtaaatatattatttattgagaaagaaaatggcaaaacacaatatgtcaaattgtcaatcattcgtgtagggtaaggtaagaaacgcaatagtaatgaactgaaaggaagggacgcaggtagtgtcccacaatgagggcaacatcttatataacatgggcttcttttgctatgtctatctcttccaacccatttttctcctctatttttttccatttgattagattgacatgacccctctgacatatgtgtgtctttgcatggattccaatttacaaaacggtgtcgtcttcctctcattaacccaccctcctagtggctaatatataccaattccatcatactaaagcaaaagtggtatgtgtgagagagtgataaagatccaatatctcccaaaggaatatcacatgggtgataggtgtcgatggacggttgatgtttgattcctttcaatcacaccaacacctctctttacccctacaacttattagagtgaaactaaaccaaaaaccttttcatattatattatattatattaatatcaatatgtttaataaaacttaattaataacacgttaaatttattaaaaagacttaaattttattcctgtcaacaggttttagcactttgcgttattctaagccactgagttttgatatgattccaatcaaactaacaaaaaatgtgcacatctcaatctaacatagtacttgttaaaaagttaacttaatcctttttgttatcaaaagttatttcttaattgttgcacatctatatataaattaaatcttgccaatattcttaagaatattttaacacttaagcatgttaaaaatggaataaatataagacaattaagaagcataacatataagtacgtaattaatactagtaccgtttttactttggatataattttagtgaaagagtgaagcactttttctctctcctccatttccattaatttcatgatgtgagtgtgactgatagatagccaacaatagtactacgcataaacagtggtagtgcatagacctagctagctaagagggtgagtttcacattattcacatacatagatacatcttatttcattgggaaggaaaactctgagttaagttgcagaaccacacgttaaccctgcgtgtagcctgtgtgtctccacctgcattcaacacacacagcaacagcaacagcacactggtagtagtgtttgagagagagagagagaatgagattaataagaagcaaagcaacactgttgatgcacagaaggaagaaggtagactacacattcccaagggcaggactctgaaatctgaatctgaatctgattcccaccaccttttacaggctatagagccaagagcccaaaaatccctattgttctgactgactatccatttaggttctttggagttttctacaaataaaggacccagattttttagcttcatttccgggagtactctctggacaattatatgcagtgtgctctttttgagaaaacagtaaggtggggactagtaactaggaacaactgatccaagccaaagaggtagtagagctacatactcatacagctattggttttactattcctattttactattactattttataatataaaataaatacatatattatatatgtagcatgtggagttttagttatttttacatggtgagagagagtgaaacaaagagagagagagagagatagcactttcattttcgttcctttcaagggttttaactacacaacttattattactttgaaactatgatagggtttggagggaacagttgcagtgagctttctgagatggacatgatgaacatggaaactaataataggaagtttctttctctgcctctcagtaacaacaacaacaacaacaactctggtaatgcccaaatgcgcagaagtagtgataatagaagggtacctgtcactagcaatagcaatatcgctcaggaacatcactacagccaccacaaccccaccgacacttgcagtatgagggataaaatcatggcacaccctctttttcctcgtctcttgtcctcttacctcaattgcctcaaggtgatgataaactctatattgttctccatattcacataaattacacacatctctttccctttcctcctaacacatattgtccttatatagaatgtataaggttggtttagtggtaaaggaagaagaaaaggaaaaagaagttgtgggtttgaaatctcgcagacaaaaactaacaatattaactaaaaaatattttcgataaaaaaaaaaatattccttatctatatgatcatacactcttgtaattaacttgtaaactataattgcactcatatctctacttctctttcatgggtttcatgaggactcaaatttcctgttgtggttttgctttttgagatttttgtttatgtgttttcatgtttttcttgttttgatggtgtgagtggcgtatttacaggttggagcacctccagaagtggtggctagcttagaggagtcatgtgccaaatgcgagtccttcaatgcatcatcaggaaggacaggaggtggttcaataggtgaagatccagctctggaccagttcatggaggcctactgtgagatgctcattaagtatgagcaagagctcacaaaacccttcaaagaagccatgcttttcttctcaagaattgagtgtcagctcaaagccctagcagtttcatcagattttggtgattaattacccttaaatcattatttgttcctacacttctctgagtactgtggagcaattatggactacgatttcttgttttgggaagttggtgacaaagattgggtgtcagtatatgtgagagtcaacttaattagtaatccatgctcgtgtgacctatatatattatataggagagaaaaaaaagatgaatgaattagcaacacaatcgtggatcgttgttttaccactatgaaattattactagaaatcaaccctgtgtggaaaggttttggttagaggctaagtaagtaatgttgaatcacggcttaacttgctatacccttaggctagtggtagttcttctgtctctcaaagtctttaaaccctctggaaatatgctgcaagcattgaagggatctatgaccttgctagctagtcactactcataactctgatcttcagaagcaatattgtctttcaaagctaaatgttggtattaactattaatattaagtggttgagtaattaatgataaccacacagctgatggtgcaattgataccaataaaaaaaggaaaaccacacctgcctatgctggataaatgtgtttttactaagaatgatgtgatgctgaatttgtttgtttattacatatcatcatctgaattaattgaaaagagttagtcaaataacctttctcatcgtaaatagtgtgattagttataaaggaacttgattaaaaacctttacagtgtttttaagaatggtaataataatgggtccaaggtgtttgaattaggtcaaaaagtttgaaaacgatgattaatccatattactgcttgaggggaaatcaagaaaaatgagattttgttatattattctaatgataaaaaagtttattcttaccccaataatatatgctgcttaatcaagtgacccattgataatcttgatggctttcgggttattttttaaaggtatttttctttttggttcgtgtgaccttggtgttactcattatttcatacgtactcagtgagttgtcaccaatgcaaggcattagtcttctttctttctgtttaattcattctcttcatttagattcatggctctctctgtcaaagtccctttaagaacttagttgaaaaaggaaactccttgtcttatcttatgttgtcatatgtttccttgtcaatttgtttcctctgtagcttaattaaaaaaaaaaaaacaatgtaaattttgagtttgtatgattattttgttatttccttccttagtatgttctctggtggtggaggaaagggttacatttttagctctaacagtgaaccatatctcttgtttataattgcttacttttttttagtaaaggttgtactcttaaatggccttttataataagaagttatctgtatgcatggtgagatacattttgcactgatctaaagttcagttattttctttgcaactttctcctatttagtaacaaagctagtgtgtaatacagaaaaaacattgcaatgaaatttagtttttaacatgtttttgtcatttcttaggtaatgcatgttatttgatagttcagaaaaatgaacatataatcttaacataatgctttctttaattgatacatatcaaaattaaataatgttatatcttcctatcatattattctactaatcctcttaatactttattaaaattgtattaaatgaataactaaatataattaatatcttataaaataaaaataaaaatacttactttatctagtaaggggattagtatgatttagaattatttgatgtattatttctgtgttaaatgtcaatagttataactgacatgcaattttatgatgtcaatattttcatgatggatatttatttgcatgaattgtttttactgataacttttaattttttattccattttgttgtggcaattttaaggtcaaagtgaaacatcttcacagaatgaggttgatgttcatgaaaacaacctagattctcaagctgaagaccgcgaacttaaagtccagcttttgcgcaagtatagtggatatctagggagcctcaagaaggaatttttgaagaagaaaaagaatggaaagttgccaaaggaagctcggcaacagctacttgattggtggaacaggcattataaatggccttacccttcggtaactaagttctacatcctttataaaccatagagaaatgctagtaacatttttttttaacaaactctttattgattatttggctgaaaatgattaaaaatcataatatatgggtcacatttcatgtttaatgagtctcatgtatgattttgtatttttaacatattttaattaagagtagcgtgtgcgtattatagagtgtggttgtacttctctttatagtttataccatgccttcacaatgtgtatcttgataaatactcatattttcatttcaaaataccttgtttcctttatattttcaccaaaatatagccacatttggtggtgctatagcctttggtattaattagaaaataatcctggtaatatgaatttcaatattgaaacgttaaattgttagtatgttggtatcaacagccaattgtgcattaattaattcataagttttgtttactatttatatatatccgatgactaatcttatgttatggcaatggtgaatgtgattggataaacatgtaggaatctcaaaagcaggcacttgcagaatccacaggcctagatctgaaacaaatcaacaactggttcatcaatcagagaaaacgccattggaagccttctgaggatatgcaatttgccgtgatggatgcaactaactactacatggaaaatgttatgtgcaagccgtttccaatggatggcatgcctatgcttctttaactcaatcctctactagaatattcaaaagcttagccgagaaaaccctatctattttaagtttcctaggtcgccaggttgctatatttaatatgtcattgatgaatgtttactttaaattgtagaaagcaggatgaaaattctgtcatccctgaactgcaatctatgttagtgagcgtgaatccaactatatgctctattatctacacactgtttgcggagatcactagagatgttgtgtatgttttgtttcctaatttaatgaaaatgatttgttttcatacgtaaatgcattaaactgataaaaaaaaaattaatgtactggaaagaaacctaaatggtattgattcatcaatcgaaggacttttttttttttaaacaacatagtcttatatatactcatattttctcacatcacttgggttaagcaacgctgttgaacacattagttgtacttaactacttgtatataattataattatcgttgtccaaaattttcttgattcacgtgtgttgcatgtctactatatgtgtgcaatatagtttgtttgtgttatagaaatgttgtggtcgtacagtgttggtatgcggtcctcatgactgagcccttgttgtttgcttcttgtaaccaaggttttcgatcatttggagcagcaactaatgtttcttttttttgtgtgtaaacaaaaacaacgaatatatgattatgactgagaaagattatcattattagatataaaattggtttgtataaaatggtgtatatgtgtatagatcgatatgtggaaagagggacagagatcgaaaggtagattttacatcactataagaatttttttttcctttttttaagcccctttttaagtcgggtaaaaatagtttattatttgaaaggaataaatgtgcacatttaaaaacaatcagtaggtattcatataatattcgattattaaataaataaataaaagtacacaagcataagaatttaaaactttgaatttataaaatctccaaaattagttaattaatgcagtaatcaaaattagttaatgaactaaatgttattttatggatcatttatgtattatatatcaatgtctcattagtggtagtgagaaaaaagtaaatgaggattgtacaattaatcatggtaatttgatataaaatagatcaaaaattttgtgttacatatcatctcattcacatgtttataaattatagattatgttggataataatacattttaattagtttcaccgtcagaaaatcaaattattagttctaatcctataaatctttcccaaattcaggaggtcgcctccgaataggagagaaacaattcttcatcatagttggacagtggagcaaacagtttcattatttaaatttataataacacatcaaattattgctccaatattagattagatcaagtatatatggtgcttttagaaagtttctctgttcgttaaaaaaacacaaaatgtataggagttatattaaaatttattttagaaataattatgttactttagaaaatataatactttttgcaatcttttaggaagctcattttattttggttaagcttttaatagtaaatatacttatgccttcatttggtcactcacgttcatgtatgttattattatttttggattaattaatactatatatagggtgtgggaactttgtttatttgtagcacttttcatgcatgactttggatctacatacaaatgattttgtaatattttgatggtttacttagacttttaagaaaatgtaagattttttcttttcataaagtatatttaatatgtgcataaaacaaaaaaacctatagaaacattcaatatactatctttctttatatgttattgatagtagggcttgatactggttatttgttttacatgctataccgaggtaacatacaattggtcctaatggggttaagcctttctatgaagactaatagcattttataatttccttatgcaacatgtagtaacttgtaaatttgtatatcttttgaaaacattgttgtgtaaatgttgtatataagtaccagtgtgttaccccatgcctgatacgggtgatatttacttatacagttatacttattgtgaacatataaaataaatattataataaaattttgagaattaaattgttaaaattattcagttaaaagatttgttaaaattataaaaaaaaaattaataactttgaaaaaaatcaatttttctttagattaaaaaatataatattataactgtaatacaaatgcttctttaaatgagaaaaaacttcaatacttaattgagaagcttcctatccaaatttataaaatactaaattctacaataaattgtacatcaagcctgcattttcataaatttcctagtaatattatatataatcttcaagttagttctacattagttcctttttttaaatgttcataaaataaatttattaaagacaaaatttctctatattaatcttaaagatgatttttgtaagaattaatatgataacatatgtaataatgaataattgattaacgttgaatttctctctctctctctctctctcgcaagaatagaacataaaaaacacacattaaagataatatattactcaacagttctaatttaaccatgatcattcatttaaaaactaattattccagacagagttagcaaagtgaaaaactcaggtctctatatgatttacgtgaaagcatgcaaagataaaaaggggtgatgtttttctttgttaacttctcacctctttaacttataactcatcaattatttttctttttaattcattcaaaactcaaaatttattcataacaaaaattgcaggtggaaaaaaattacattaagctaaaggtgattgatttgtatatttaaattaattatagtcacgaattttattgacattaaaaagtgtgtcacaatctccctacaaataaccatcagacaaccattatttattagagctgaaatgaaaaaaaaatgtgtttgattggtgcgtttgggacaatagaaaaaatatataattagattctttttaaaacaatttatcgtatatataactaattattgttataattaattataatcaggactagtttttgtttaaataattttactgaatttttttaaaataattaattttatttagatttaacaaaaaaatattttttacataatatattacaaaaaaagatatgtataaagctgaaaggaaatttttttagaaagtttgaaataatttaggaataacgtgtttgaaggcaaacaaattgttgaaaatacatcgtaagctattacactataaattaaattatcgcaaaacattttttcaagaaaaaaactttcttttttatcaacatgatgtgcattgtttacactttggtaatttcataatttacctttgatataactttaaattaattataaaaaaattaacaaatttatgatgtataatgagttataattaaataatgatgtacaactttttaaatgcaattataaaatttaccatcaaacttttattattacatgaattttactactctagttttatttttgtaaattttatcatccaatttttataattttttgaattttaccattacgaattttatcatccaactttcaacattttataaattttattatctaaattttttatttttgtatatttttccattacattgataacaaaacaatataaaaaaattatttttttctaaaattttgtatatatgtaattgtgatcatgtcaaaaagtaattatctatatcattgtggtcatatctgatatagaaaatcacattttacatgagttataattataatcgatattaaaatttaaaataaacaatcttccatcaactataataaaatgtaatcaaaatcaaaattttgagtgataaaatctgtaaaaataaaatttgttctgataaaatttacagaaaaataaaaattaaatagtataatttacaattaaggaaactttttacctcaccaatgtgtgactctttttccccttcgaaatctgttgaataattccaaataatccgacccgacccgacccaggtcgccaaaccaaacctcatagcacagaagtctaaactgtgctttttgttggttggggcgttaggggtttctcattttttatcccaaacacttccgtcagtggtgtccgcatttccttcccgccgataaccttttcgggtgattgttcttcttcgctcacgcaccgcacgcgtaacggtaatcctttctctctttttgattcttaacttgaagctattcacaacttcacatttagtttgtttgtttgttttttcagtagttcattccctttgttggttccaatttgcaatcatgttctagtttgtatccataattgagtctcctatatcacgttgaatcgtagttgataacttgtgttggccgggttgtaacggctcttgtgatttatctaacttgcgtatctgcctaccacatgtttgataaaatgcctgagctaatgtcattttacatatcttttagagtaaattgcacttacaccccctgaggtttcgtcaattttctcccgacgctcttcttttttttacccctacgctaaaccctcttaattgttggaagaacattacgccgatacctcttctacattatattaacgccctttattgtttgaaaacattacaccgtgtacccctttaaggtggttgctttaaacgttaaaaataaaaatacaaataaaagaagagggttatgttatgtgtaatctcaagaaattttaggagattgtctgtgtaatttactcactcttttattatcatcttttttaatcttttcttgtttcaatggcaaggaggttttataaatgctttcttacctttccttcactactttatttgcatatacttttgtcactctctaactgttttcttcaatgtgagttattcaaggtaagattttctgtctgcttgcatcaagtagtatcaaacatgcagtattggagttgaatgaagtgtatggattttgtttcttttcttatcaagactgattttacttaaacttgtttttttatctgtttttgtatgataattgtttaattttggtatctagtttgagtatgaaaaacataataacttgatttgtttcttaatgctgttctgacttcaagctgaaggcatgaatgcgttcaaggcatacaaggcctgtgtgccaattgcttggagccccaatatctatataactctggtgaggggtattccggggaccaggaggctccataggcgcactttggaagcacttcgcttgcgcaaatgcaatcgaactgtcatgcgatggaacacacctacagttaggggaatgctccaacaggttttagcaaaagctctacacaagtccattttctgcttgatatgacttatccctctgtatactaacattggtaaactttgtaattaatataggtcaagaggttagttgttattgagactgaggaaatgtacaaggcacgcaagcagaaggaagaagcgcacagagctctacggcctccgttggtcataagtcacagacctccctcggttaccgatgccttataaagtcttctgcgttcttaaagattttatcttcttgatactaaaactatccaatgccattgtttaaagctttggtctcaaatggactaaattttgctttcaagatcatgtcatagtttgattctacgattctgtagtgttttctactgataacattagtcaaattcaggcctctgctcatgaaacctgtctagcaagtgttcatttatttatatctttagtttgggaatatttataatttattccataattgccttttctcttttggaaacaactcactgtcgtttgccttttttttatctctgtaaatacttaattatacatcacaattgtcctcgttaaatgaggtcgacaaaatacccaaaaattaacaaattcggggcacaatgttttgttcttacacactatatattgggccacacaaaatgagattttaagactatatcttatgcttcttccttttcatcaactccaactttcacatcatttgcactcacaagctctttgtctgcatcgtcattaggctttatgctgttctgaactttgtactgatgcctcattgctaatacaagaaaaaatatgaaattcagtactcctagcactgcgagcaaccaatagaagtaatctaacctgcccttgttcagattgctccttagccatcttttattacttgctttgtccacaattgccaccaataagctactgacaaaataacccattgaaagtgtagataggaaaagtccagtgctcatagatttcattctctctggtgcctccctaatgaaaaattctagttgtccaacataggcaaatgcttctccagcacccaccagaaaaaattgagggaccagccaaaaggcgcttatggtattattttttactgcattcaccctcctttctttctcaaccattgcagcaaccgccatggcaacaatggagaaaacgagtccaattccaaccctctggagacttgtgagcccttgggcattgtgggtgagtttccgagctaagggcacggtgagtttctcatttagagaagtaaagaggagaatggtaatgatgagaaaagctgatagagatcctgctgggacgactagagatccaacttttcgattcatgaatgtagcttgctcaatggtgaaggtattcatttgagaatagattgtccagaagaggatacatgtagaccaaataggaaggagcttgattaccattttaacctcctcaacctgagtcactgtggaaactatccacgggttttccttgatttcatcctttgagcagttctcatctaggattgcagctttgtcgaggaacctgtcagaccaaatacaaagcagtgaaaatacatgttagcttactatttccctaggaaatgaatgacattattattataaatcgttccttgtgttttcaccgaagaatcaattcatagctatggacacatgttgattcaagaataaatatggtatcaaattagtatcatataatccaaaatttgttttaaggttgcagttagataattcaatctaaagcaagatgtttggatatattatttttgtttaaatgcttcaaaatatataattcgtcatgcaaaatgagtaatgagtagcatacacataagaaaaatcgatctaataggatcggcctcgtcgtaaaaaatttaggtaatctatataaatttttatgtttaaaccttatcagtattatttattatatcaaaaaaaaaatattagaagatatgtgcaaagattaactaaaaaatacttatggaattttttttaacaacttcataaattgagagtgtgtgtgtgtatatatatatatatatatatattctatgtcagttttaatatataaatgttcaattaaatgttattattatattatattttttaaagttttctttttgtaatttcaattgcatttccgattctctttacccatgcttcattctcgtcgcctgtggaagtggaaggcctaaacacccaaagctaaatgctatgttggatcattaaagaacattaatatctcataattgtttttgagtaaatttctatattttgatctcaagttgaaaaatgaatttatggtctaaaactaattttttactaaaataattttagatagcttctatattagattaaaaaaaacagttttcgttgagttttactattaataacttatttttaataaaaaaaacatttaaataaaatcaaattacttaacttcagaattaattacattcaaaactaatttttacaaagtgattgtttaaaaggtttgtgatctgagtggagcacagagtagtgtgtagctggaaaaaatacatgtatcgtctccattgtgatttgagtgagtgagtgagaaagatctgtctcatttctattcctcgcaggtgacaaagatgtgtcaagatgaaatatgtgttcattggcagaaccatatactaaaaaagaaaaacttttttttgttttgttttttatttttaaaaaaaagttttcacaaatcactttacaaaataaattttgaaaaaaaagggcaaaatactattcctttccaacagacgctgctcttttttcgttttcacaattcctttttgaggactgttcaatcaaacgtaaaattgttccttttctagagacaatacaaacacttatgttgtcccagatagtaatagaaatagtaataatcccgtgaaagtaatcattatcagaaccacaaaaaatgagaaaatcttttgaaattgctgtgcaataattgaagaaaaagacaatccagcacaaaaagagtaaattaccattttggtacatggaagtataaaattgtcatattaattcttaaaattaagaaatttttattttaatctttaaacatatttcacatgatatttatgattacaatttgaccatacggactgtggtcaatcccaatacaaaaacttatgttaatagccttttttatcagtagtatgtccatcttaaatttagactaatatgattaacgaattacaagaactaatattgtaaatagtttactcttagtcatgttgattgctttaagaggaagacagaaaatttacctgaacctctgagtatgtgggaccttagcttcaagataaccattgagaaaggaggattgtgaaggaataggaagactcctcttcttccaagccaaaaacagcactctccatataattgtcaaggggcttccttgtggcctcttgaatctatagaatggtgtcccacaaagcaaaacagcaacagcaatcaccattgtccctgctgaaattccataaccccaccctctccctatgttgtcttgcacatacaccagcaccaccacagagaacaaggaccctatgctgatgaagaagtagaacctgttgaagaaaaacaccatccttctttcctccttggggtcttttgaatcaaactgatctgatccaaaacctgagacattggattttattcctccaccacccactgctactgtgtaaagtgccacaaatagcaaagccatttgtttgccactggcctgaatgcattcatggtgttgttttctgacactgctgcatacaggaggcctcatgctaggaatggttgtagccacagttaacaaacacaccccctagtccaagaaagatgtgacaagaaaactagtttgtgactgctagtatggctagtaatatgctagagtaaatagtgaatgtaattagttacttacttttatttttgtataataagtttattgacttttacaatatttattttataagtcatattaatgatgatgtttatttctgattgattgatagttaagtgcatagaaatcaaactaagaaaattatgttatttgcaattgaaaaccactttccctagagggaagggagacattggttgctttagtgtgattaaaagccaaaagaaattagagaattgagcattgagtatatctaaatatgcaaagcttttaacataccaaagcagctatgattgcagatatggcaacagttaagtatctgccaagtttagcatcagctatgaagccaccaagaaggccaagcaggttgagagttcccatgacattggtaactatggtggcagaatcagctgaagggagattcaaaactccaaccaaataggtcactaagttcatgcttatgcccatcacacatattctttctgccagttcagtacctacataaaaaaaaaaaaaaaaaaaagttatgtgttggagccaaattgaagagcgctttggttcaaccttgaaaacatgactaaaatttctatggattgagatgaatatgaacctaagatgagccctgctgctagccatcccccagtttttgtcttgtccacagggtggcctcgaaaatcaacagtagcaatgccttctgcccctttttcctcctcgccatgacttgcaactagaacctagaagatagcaaaaatgcaaaaatcattaagacatcaacaaagtatagaaataagctttgaacaatcaaaaagggttcttgaaaatgaagttaacaccatgttttatcttctgttggagggataactgaggagagttttgctgaagtgcgtgtgtgtttcagcttcaagagttgcaacgtatagaaagtggtatgcaaatgcaaagttaattagctatgtcatgacaaggacaagtttgataagaactagtttgtaataggtccacttgatgagaagatgagtggcctgaaatgctgaactgcaaagtttgagtccgcgtgctttggagttttataagctattgttgtgtggcttaagaagaccgtactggcctaatgaaaacaacatcttgggaaagtgatggaacagtataggcactcctaatttgccatcacaaagtcacagtcgtagtgaacatatgaaaaaagaaaagcttttacaaatccatgttcttctgctcctcttgctttatcaagtaattaccatgatgaacaaacaattaattggacgatgaaggtggattatacaggtacgtttgtttgttgcatcagcaaattttaactgagtagttttagttgaaatttgaaaagctatgttggtctatctgttacacaggaagccagaaattgaagcgtttggagaagtgcatttgtatgcatcatttgttgcgttacagattttctaaaagtaacatgctcaatgtatgttaaaggaggaaatgatccttataaacatgcaattacaacaccaccacatcctcttatgtactatgtgttaaaggaaaggttctagagcaatgtgagtgtttatactgttgattatacaatgcgtagataatacgagattatgtccatgtgactatgtgagtgattgtactgttgtctattggcaattttcgaagacaaaagaaaatgcatgcttctagaacaatgtggaaattacaatcaaattcttctttaaagtttaagtctaacaaaaataaaataagatatatagacccaaaaaaaatcaaaagaaataaagaaagaacacagactagaagtaaaaattctattaaaaaaaaaaaaaaaatcaaagagaggaaaggattaatattttgaaaatactaataagtataggatcttgctaacttagagcactggttaacgaattactagaaaaaatgtttaattggaaatatataagagaacattttaaaatcatgggttttttcttttatttctttaatcattgatctaactaaggagtattgatcagccttcgtcataatgattagcatttgttatgagtaaagataattgaaaaacttttctaattattaagctatgcttagataaaaattggaaaattttctttgtaaattccaaagaatatttatgaattttaatgttcaaaatgaagaaggagcaaattgatgatttgaaagtacagttacttttaagatcttcatccaaacatacatgcactcattattctgttgtctaacttaaaattcattttttaaaatctttaattacaacatatagtttgaatccaccataaaactgcatcaaagaacacttccatcacttgttgaactgaatagtttgactttgagcaaagttatatattcggagtgtagcgatgttgatgctttgttctttttctgttttcaaaattcatacattatgtttagcgcaagagagaaaaaaaaaacacttgtttataattctgatttttttatattatattttaataagagaaaaataaagtcccgattttttcttttatctttttgtgaaattatgtagccattttattatgagataaaaacgtattatctttcttcgttttttcgagaaaaaaaaaaagaacttaagactttgtgttctgttaaaaaaaaacgttgtgtaaattatttaaaccctccatgctagcctagtgagctactaccaattaacttaccactaattgtttatagtaaagtaattacagactgaaattcaattaatcaaagaatgttaaattcatttttttttctttgaaaagaatgtgaaataaataatataggagtaatttatataaaacaaaggaaatcaacagggttgagcttcgtggtatgttagtcccttataatatacttgtgaataaaaattcttagtcaaaattgaaaaatatattaatatttaatgttcgaaaatatgattatttttaaaagaaaacaaaaaagaaaaatatgttcatagcataatccaagattaagcttaaccaattaagaaacgtgtttggatataaatttctttagaagtacttttagaagaagaaagtaaaaagaaaaaaaatgaaattagcttctccataagctaaaatgagttttccattagttcatttgtagatgtcatctcatcttttagagaagttatattggtgagcttctaaaaattagttaatggagaacttattatggcttatgaaaaaactcatctcatttttttcttcttttaaaagtgtttctaaagaagcctacccaaacaggctctattattgttctgttgtcgaccgatgatttgtcgtttaataatacattgtataataatatattaagatgtgctaataatatttttttaaatacaattatttatattaaataaattatttaaaaatataaaattatacgtgtattcataaattaaaaaatgagacttttaatttttgcaatttttaataaatttaaactaattgcaaaaaaaaaagtgttctaagaatatatctaaaaatgtgttgctaacattcaatggacactcacaaccctaaattttttttccttttgctgtttcttttggcggagaattcccttaaactattagctttattttataaaatgaaaactttttatttttttaaaaataaattttgaaagagtactttgcgtaccaaagtaagttagcccccacctttggtatccatcggtgattaatacatgatatagatccaaatgaatcaaatgcaaagatattagtgactattactcgtaagcatcagacaagtgatgtaacaaaatttgggagcctaccttgaccctagttcgaggcaacatactctcacctcaaatttgcattatttttaaaacaaatctctaattattattatttttatttattatccacttccttattctaatgactatattgaccttatcattatttttattattattattggaattattattattattattattgactttaattgaattcaaactaactggaagagaaaataattatttgactacgtattgttctttaaaaaatgaccattctttgctctcttatcatctattatcttttatataaaaaaaatctctaagatttttaatatttcaatttttttaatgtgtgtttgatgacatgttagtaaataaatttcaaataattattcaaaaatcaatttatgtatataatatttacttttattttttcaaaatttaaactcaaacttcccccaactttggcagagagaataaatttgtctggaaaggtacttgatgcatcagcgaatctcatggggtgcgtgtaacaattagctcctgctacttgtcatcacagtgtgttgatgaatattaaaaatctaagctgttgcattgcatgaacgaacacacctactaaaggtgtatatattcgagccctttgaatgtttcttacatttgtcactttcagtatattgttcaagaaacggccagttaatttcgtgacacaacagaacttcaattcagacgcactcctatatcagacaatgatgataagaacctgtcttttcattttcatcaacactgttttgagaggtatgaatcgagcaacacgtacgtacacactgtcacacatgacccctgttgaattaaaaaaagaataatgttcttgtcttaagtcttaacttttgttatatatagttattaccggccaaaacgtgtattataaatcaactgaactggaatgatacatgggtgggaaactgggaatgccatgtcaaatttatagaataacacataagtaactaaaggacacttcgcatgcacgcgcatgtgttaattgattttgaattaatgtaatttgtgttggaatgttttttatcataatttatttctataaataatatatttgcattcacttattttatgtgattttttttatcacttatgaagcagtccattgtagcttttacgtatttaaacatttggacgtcattttttatgttggaacatgtgtccaaatagatacttaattgttcaacaaaaaattaacttaaaattattttaacacaattaattctaaacctaaaatcaaattttcaatgtaaaactaaacatcgatcctctaaaaatgtaaaattgcatatggccaatagtccaaatagagaagttagatttttcatatgatctcatctcttattatgaatagactaattatttttctaatattcttatattatatatatatatatatatatatatatatatataatttgggttggtcaatcaattaggatgtcctaaaaaatatacttttaatttttttaaatattctaataaaaaggttcttgtttttcgtcaataatgttagtctaattttttttttactctaacaacaattatattattattataatctttttagtgaataatataaaagaaaataatagaaatttttttaaaaataataattaaataatttcttcatatttttagaaattggagtcgaaatttacatggatataaaaatttatctaaaatcactaaatcttaattaacatcattcagtaaaatttaactaaaattaaacatgtatttcaatagtcatgtgcgccatccattccggggtacgtatatatccaaacacaggctaagactttatatattcctaagtgatgtgtgggacattttaatacactcagctcttacaatttttttgggcaaacacattccttaatcttaaaagggtatattttggctcatgtttagcctaagtattttaatgaactattaaacatatatattgtggagtatagttaacgatttctattttttaaagttaataaaatgtaacttaagattaatatctcaacaaatatttcataaacttactttgttattaatttcaaaaacgctagataaaattagtacaatattttttcatgttaaaagtttttaaaaaaaatacacttgacaaaaaaaaaatctatattgaattcatatcgcatagtaataactttaatctctatctctatatcaatgtaaaaaaagtctccatctctgtatcttttatacacctatatattcatacatactcacactgttacacatactttacttatatgtaaaatcaattagttgataaaaattattaattaaaaaatttctccaaattgaattgaaaaatcattctttaaatcatatatctaatcacacgacatgagtaatataatcatttaacataattattcttaaatataatattttaattcctaaagttgattaataatgcaggtgtacccattatcctgagtatttttttaagtacccataaagtattgatagaatttttgtcctaatgtgaaattatatttatgccttccttgtaccaagtcttagagcatttcgtaacaagtaaaagttctactttaattaactttgaagatgacaacggatatacttttatttaaatacaagttataaatgttttgggagatttctttactaaaaatataaatgttttcatcttaatttaatgaactaaacttcatcttatttatcaatggtcatgatgaattcaccatgaccatcgtcggaaggttgatactgttcagagatagttgtcatcatattgccatgaccgtcatgctcactacggtcatgttggatgtattaagcgttgtcatgtgacaaagtttttaaatctttaggtaaaattagaaatttccactctcttcatgctgtatcagatttatatttccatccaactgtagatgcagttccatcttgacctcgacctgcatttggaacgtgtgcaaaagactagatccattttatagaatacccaaaaacttgtagctctcaatttttacagaaaacttttactaaagggcaccatggacttctccaaattgttgcctcgaactctgttttttacgttctaaaagaactcgtgccaccacaatgttgttataaatcaatctgaccatttaaaaaacactttgggtttaactatgattacgataaagtttatacttactcctcaacaattaaaatatcttcgtagggtgctggagtattctgattcagattggaatattcttcgtaggatgtaattagcagttagattgttagataatagttagtttttgttatttttgttataactaactttgatataaaaaacactatataaaaggtgcacatatgtgtaaatataagagtgaaatatacaagttttcatttaaatttatcctgttgttatatttgtgcaaagagttttttctccaacaaacattaagactttttaagttttgactgttagttagaaatgtgtccatcgcatttatctgcaatattaacaaattcatctttgtgattgatacttaaagccctggacacgtttaagcggataaagtaataagtatgaacttgtttttggttttccacacgttactgctacgatgtagaattgtatgacatggaatgggaagaagataaattgtagtttgactttagagaaaataagaggagaaatgtacgattcccttgcttgaggggatatcccacacgagttgccgtctacatcatgctactagtttttaacttggaaaaaatgcaagtagcagacgcagaaaaatggataatgttgttcttacttatgataatttttacaataaaaaagataaaaaaaaatgtagaataaaattataatgtaataagaaaaagaaaaaaaaggtgttatgaaaatacaaagtacagattgttattataagaaagaattgtgtaccaacccataacagttgtatgttctggactggtgtatactctattcttctagtgttctcttctttttacaaattaattctaacgcatcgttgttttggacagtagaagatacattgacttcaatgaaaggacagaagctaaacgccaagaaaaaattacattatatattttaatttttgaatcgcaattattttatattttaaatttttaataatggtgtgccaattattcattgaccacaacaagaatatctcaaatggaaaagaccctctttcttttgacgtcaaaacacattatgggtgcaactgataatgaagcctgaggaaaaagagaggaagttgcgtatgaatatatgatagactttgttgacttcaggttgacttcctatcaggactttttggttatcatggctaaaacagaaagtaaatatagtaactttggccatagattttttattattatacagaataatccatggaataaattttttttcctgagaagttaaaattctatatagcaagttaaacaattaatttttcttctttattttttcattaccaatacatatttctctttcttaccatagagtgtgtaggaaaaagtgtaataaactgtgtgaagcagcgctacatattacatgtcttttccaagaaggtacctcaattcacttataattttctttttgttttctatctcttgatacaagtgcacaccaaatttgcaaatccatgttttcaaacaattgaacacaaacttatgaaatactaacaaattaatcacatgaagcagcacctaaagctaccggattccatcatggcattctatgcatcatatctaaatggctcaaccaccaattcactcacaaaaaaaccaacttctaagtgtacctattgataaaggattgattagtggaaacagtacaagaataatctatacattttattgacctataaccacggatgttaaatctacaaaggagaagagataataacacatgctcccttttgctgactgtgtacatatctacgattgtcaatcgtgctttcttttgcatctttcaagtcggcaaagtctgaagcaagtgtaaactagcactaggaatgaaacaaacatcactgcaacaaaaaaaaatgaaaattatcccttgaaaccaaatgatagtaagcaaaataccaaaaacacaaacaattcggttttaatcatactatgcatggaaactttaaaagagtgaaatccaaagtaaataacacgcatgtgcgaacacatacagaggatcagaggatcactagcaagtgcaacttagaattgacttaccaaataaggtgaaaaagaacaagattgccaggcgatatcttacaatccatggtagactaacttcaagagtgcaatgctttgaattattatgctctgcttttaccctgtctaaaatctctgaatttgatggttgtaattccgttaatgaaacatcaacgcctgtaactgtgacactatccttgtccctgactttgaatttcaaagtcactgggtgagagtcccaatctatttcaatagttccaaagtttggctgacctaatgaaagtccacaattgaaacatcaaaacatgaaagccaatatacagtaaatattcttacccaaaaataaagaagaaaagtttaccataaatacaagatttgtatctgcagttttggtccttaactctcattgtagatggggtcaaccatgccacaaatctcacaaaagaacgcaagaaagatgggacaacctcctcaactgattgagtaaccccacttgaggttaaatcatatagtggatagtccaaagcacaatcatatctcgtgatttccccaaagtgaacatctccactaataaaaaatactccagccctctgcatagaaaagactaataagaagtgaaatgagtcctcactacagctacgtaaatgataccaaggtaattccctttaacaacatagatgtaaaacatagaaaatgaatgtactgaaagttgttaccttactatcagcgattaatttaaaaaggcgatctctttcctttggaaaacgaccccatgattccattgagaacaatggatgaatggttgctgaaagatttgatataacctgacatagaaaagaatatagaaatgatttcatattaacaacataaaaacgactctcaattttccaaggtgcaacaattcaagcacaaaactgaattatatattgagttcagcaagatcttcatgagaaaagcgcccagtcaaatatagatatacagtttcaagaatacaggcataataattgataatgtagacaaaactcaaagatgcagatgtcatgtaataatatttatcatgtttagtattttgaataattcttattaatctctggcattataacaattgatacctaattgctgtacctgaatagaagatccaattatggtgagagctgttggtggacccttgagctctgtctccaaccacaaccattgtgaattccccaaaatggttccatcacttcctacagggtctctgtgatatctggtatctaagaggacaatctgaacagttttccccaaaccacagtaaaagcaaatattagcacaagaggcatgcttaaaagttaaaacacaatttaaaagcaactctcaagtcttaattattgacaaaaacaaaatgagttcttaaacatcaaaaggcattttaagatgatcatggttacatcctatgacagcacaataatcgtgaaaggactttatgaatttaacaaagaagatacattttatttgatcaataccttgatatctctacctacaggaccatacgtatatgaggcatatacaccagcctgtttccgcctgaaatgagaagctagagtataagtatctaaaatctaaatctgtatctgttgccattaaaatttattaatgggtgaatacgtatattagccagacacgtaaacatgccttctctctccaagaaaataatgaggttccacagccataggataatttaaaaaggcgatttctttcctttggaaaacaacccccggaatcaagcgaacgattcaattatatactagtatttcttaaaagaatataaatcaaatcacccaagctgtagaatacagatacgctcgacatgataatgcagcaaaagagattatccacccaccgtgggctaccttgaggttcatccaagaaatcaagaagcaacttttggttggttatttttccatgaaattctttccctgcatcatttaatccataatcgtgatcatcccatgtaccaataacctattaacataccaaatgtgaaagtcaggccaaaagaattgataagcatagtcgccattttagtactcagaaatttgaatgagaatatctactagggagcaaaaacaagtagaaaagctcagaacgaagcacctcagcattctgttggagtcgagcatagccaggatttgacttagctttttcatatttagccttcatttcctgctcagaggaaggaacaaatcgtggaacattcttccacggtccaacagtcctttcctgtccaaatattttgaaggggcgtttgaagtctccataaatgttatcacccagccatataaaaatttggggatggaagttaaccactgcatcccagatgggctggcaaagaaacaaaacactcagcatgcacatatataaatgacctgacatgaaaaagttaagaatatcctgcaagcatagcaatcaaaagcctaaataataacaattattgcacttgtgcaggggaagaggtttgtagcctaaagcagtcaaacaagaagccaatgtaagattgcaaacccaaactacaaccaaaaaaataccaaggcttaactcctctcttctagctctgtgattacgtgaatttagttgtagatgcaatacaatttagatggcttgattaagaaatactacaaaagaccatacagtaacgtacaatgtaaatcataaagttgtctagtttcagtaaaacatgaatgattttagtgataaaagtgtgaaacacactactccataatgaattttgatttcttctaaaaactgggggataaaacggaatttcacacgtatctcactcttgaacaaaaattatactatgcataattattcccaccaacaattcttacaaacagggaacatgttccataaaattaatcaaatttattttgtttgcagaaaattataccatttatccacaagacactttttttacagcattattgttgctggttttcttttaagttgagtacaacagaactgcagcttgcttaaagctgacgtaacattggcactgccacagcatgctagtacaagaattgggacatcatggttgaaacaaagaaacagaatcattagcatacaagttccattacacgacactgcaacatgggtaaaaataaataaaacaaagacaagacaaaacaaaacagaactagaataaaaagtagaaaaattaaaatagaaaaaaaaaagcataacaaaatagaaaattttttggaacctgaggagcgctctggtcggagcatgatccgaaggcaattcgagacaccacttgtttctgcttctggtgactgtcggaaccggtaacggttactactgtaacgccgaccattccaatcaaaacgacggcgttccaccaccgccgccgccaccgacgttgatcgatacccatttgcgcaaaaatcacaacttcgaatccaattctttcaaagagatcataaaaagggaactttcttaggatgtgagacaaatggcagacacaaaatgaaactttcggttgttatataatgcatttcttttctctttttttatacacttcccgataaaaaaaaaaaagaaaaaaaaagtgaagagaattcaatgaaacatttttcaaatctggaaataaatatacgtaatttttttaagacaaaaagcttcccttttttaattaaacaaaaagcttcctttttgctgcaagatatcgtcaaaagtcaatatttttctgtaaaaataatattagtttggaaattaagtttttttaaagaaaaatataagtactataggaattttacaaactagaaagacaaaaacatttttttcttttattatattatagatgtaatatattttttaatttgattaatgattaatttttattgataaatatttattcgacaattaagctattttaataaaattttccttcttaaccaaatttttcttaattacaaaatttaatgttgagactttacttaaaaagtttaaaatttagttttagtcgaattaacataatcttaatcaaaataatcttaataatttatataatttttaacagtaaaatactattatctaaccatatgttattatttatcatatatattgcttataatatgtttattaatttttaaaataattattttaaaaatcatattttaagttatattttattgtttaaaattgtaatgtacataaaaattaaaatattcttaatttatgatttattaatatacttaaataataaattaagactaatatgtgtaaaagaattggattttaagtattttttaaataataatttatgtacattatttactcaactaattgaattaaatttcattgatatatttttaaaaagaaagataatgcacatacattatgatattaattattggcctcaaaagagaaaaggaaaaaaaattaaaaatatataaatatgagaaatgataataatgtgataaaaaaaatgatgttagtaaagtatttataatattgaggtttacccattggaaaaacagaatccatgaagcaaacaaatagcaatctaataaggcaattcattcatacacatttgacaaagcttttactaccatgaccagtgtccacagtgaagcaactttatgagccgcactgattgataaatgttggaatttgtgttgactgtagttgaccactgaccaaacctggaacccatttatccaatgtcctccaaaagcatacctcaaaggcgagaaatctggacattatgcaatgaaacaaatccaatgttatcattttcaacagttaccagacagaattgcatatttctaccctctctttaatggccagagcctccataattgagggtatcttttgttcatttacttttttattgattgagagaagcaactgttcatctagtttgtttgcttgtattatatgttgtgactgagtggagttttggatagatttggattttatttgtcatgagttgggcaagaacagatagataacttggattagaggaagaggaagggccacgtgaaattttttccccccctaatgattttgtacgtaaaaggcacgtgaatttatatttaaaatagtaaaatagatagttaattctttatggtttatacatcaataataattttgaatacgatgtaccttgtttaaataattattcaatcattcgttcgtgcattttctattcaacatgaaacatcttttactgtactttgatattatcaatttttatacatattcgtttaagaggcacaaaattttggcaatgcttgtcaaccatgattctcctcgctatcaaataccaaaaccaaggaaattcacttaatgcacttctcatatttgctaattgtacttcctttattttctgaaaactaaattctgaaaagtggctagcattttaagacttcctaaaattaattttcagaaactactttctaaaaatgttataatattttctggaatttacttttcgaaagcaaaattaggagtagttttataaatttgtcaagagagacccaaagtaggacttcctaaacaccactgtctctcaaagctcctaaattgtaaggaataggttgacattaggggacgtgctttgtgaaagtggagaggacaaactcaaagacaacaatgttagagacttcatttgtttctctcttgatagatccatacaactcccatttttacttctgaaaaatagtttttgaaagtattattacactttttgaaaactacttgtttaaagcaaagataggggtgcaattttagcataagtgttaaaaattttaacactttccacaacttagtttccaaacaagaggtaactttgagggaaataaaatagaaattacctaatgggaagtgcatttataacaagagagttacatttagcaattgtccaaagaagatgaaaaaaacatactcacaaatttatttatttttaaactaaactttgtatagttttgatttctaaaaacgtaatacactatcttgttaatatttaaaaattaagaaaattctatataaataagacattgaaaattttaattattccaactaaattgcttactattaatttggtccctaaatacatattaatattatctcttaagttatatatgtgtgtgtgaattaacgtgattgatggattgcactctggtgttatttagaattttttttaattttaaaaattaatatggcgttacatatttttagggactaaaatggtgatatattttttattttattataagacaaaaatatattagatggtggagtacaaggagtaccgttgcccattattatatccttgtatgttcaagtagtagcataaaatgggttagaccaccacgacagatacattttccatatcattgctttaattcataacaaacttttcacctttatcattttttcaccacttcatctgtgttcagttgatcgataagaactaaagtatatttggtttctatgcacccgcattgaccatataatacaaattcaaatgaatttctagaaccttatctcctccctcctatttgccttccctaaatgtgaccaatatagtgttttacctaaacattgtaatgggatgtgtatgcacctagtcacatgtagctcttttgccaaatggttgtataaaataatacaagagaaaaacaaaatagtttgttgattctatgttacttatgcaaaagatacactgaagttgatctctttggtctataatacctcttctaagtatatatattggacttttggtggaattttaaccatgtaaattccttgactttttgaggggacatacagcaccatagattgttgtatagttttctatttgggtgacatttatgactttggatttaacttaattgtaggctgatttcacttaatacttacttgttttccagtaacatagtgtttgtttatcatacagcgttcagaggggcatctcgtattacaggttccggggagtgaagttccatcgtggtttgaaaacagaagtttttcttttgacgaggacacgagaaatcactatggtttcgattcagctgtatcaatagtaacaaacatccctgattcttggcgttccactgcatggtcaagaattgccatgtgacatgtgtgttgttttagaaggttaggtgtcgcaatatttgtgggaacgtagcattttattggtcttctaaaaagatcgaatggggtaaacatgggaggaattttacactaacaaccatataagtgaattagacaccacactttaacccaaaaccttaaggttcagatttatggatcttctcctcacttatatagtattcaacttttttatttctatccgatgtgggactttaactcacacttgtattccaacacaaggttgggtagatcgccctcaactattcattaggttcttaccctttaatcgtgattactgttggcaacatgtgaaaggtgaaaagaaccaacttcacttgttgctggctactgaaactcttcctcgtagtggtgttgaacattctcatcaaggaccaaaacctcgtaagcttgaaataaaaaagtgtgggtggcgtgcattgtgcaaggaagatgttgaagagtactggcgcttaattatcagcaacaaccagagaagaatattgcagcagtggcagtaataacaccgacattggtcctctgaagatttcatgcgtttccacgaagttaagagatgcagtgaggtgtttgaagcagaagctaaattaacgcctttcataaagaagtaaaagaagaagttagagatcacctgcatgacccagaaaactcttatctttttttgaccaacatgtgttatatatcatgcaattttacttcattagaattgctttttaaggaaagatactctaccaaaatttgggtcccttttatagacttttgtatccgtctttcttttatctgtttttattcatttttattttattttgtattgttattatgatttggactagcatagccccaaatttgttgtttctctcttcttcaacaataaattaaaggctaaaacttttcgattggaatttctgaaatgcaagaagcaacatccataataaaattgtttgagcccatttcaaaaaataacaaataaacaagcagaaaaaaatatccaaaatggaccacatagtccaattgcgataaaaaaaaatccaaaatggaccacatagtccaattgcgataaaaaaaatagagaaaatacaaaaaatacaaatgaaatgaaaaatgaaaaacaagccaactagaagaagctctttctcaagacaaattccatccaagtatactatatatcaatagacagaataaattcttccagtggttttacaatactgtcttaccaaataccaactattgctcctaatgcagattccttttccctcatcctgctatgagcccccatatttccatggagttttcgttgtcatcattaaacagagaaagattattgaagcaaaagcatctgcttttttaaaaacaagtcttccaaaaataacatatgcactaatgcaagacgtacatattagaggaagaggaaggcaaacataatctttgtattttttggatgtatttcatttcaattgtatcattttgtatctgacttatttaattatatgagtatgttgacttatttttattggtctaacgttttcgtccctatttttcaatttatcaaattatttaattattaggcttaattatactttttacttccaactttttaacttctaaagaattttattctaacaaattaatataacatattttattccaaacttttaagaaacttgcaaattgtatcatatatcaatttattcctaacataaattgcactttttgtctccaatttatttgtactttttgacaaattttacactcatttttttttgtgtgaattttatctctaaattttttatttcttcacaaatttttctccgaacttttgtgtttattagtagacaaataacagggaataaaatttgtaaaattattaaaagttagggataaaataggtcaaattaatttattagagtaaaattcacaaaaaatttaaaaattgagggtaaaaaataaaattaagcccaattattaaaataaaaatcaaacacataataaaaaattaactatattatggaaactagcttttatgaaggatatgttttaaagaaaaaaaaaaaaacaaacaaacaaactggcaggaatgcaaaaagtaaaaaggaggaatgtaaacaacatagcccaaatgaaaatgtgtcatccaaacccatttcatacttacctaactgaatattgcttttggattacggtccatcttcctaattggcaacatttatttgttcaatggaatgtaatcatccaaaaaaagagaaatcatcaaatcaagctgatatcatcaatccgaatggatagatatatttgtttatattgagtacatttgaggcccaaaaatctcagccaaaccacaaatcactcatcaatgaggagaaaaaagtgattgaaaagttggcttttgacttatgagaaacatatactgttttaattcactgtattatttaaaggaggcaaccaaaactgaattacaatcatgtttttggttttctatatgcaagaactttgcaaaaacaccaactaatggtgcagtattatatgtgcatgcctcagtctgcataaaattgttccttcgatcctcaaaattgtctttcccatcaggccctccaaccaaagccccaaccagaacattaggattaggtgcctggctaccataccaattatcatacccttgagtacaccctatgaaccctttattctttttgtatgacacaatggatgcccctctatggtgcacccttttagggtagttagggccatacccaactaaatagctcatgttcattgggttggaccccaaaatgtagtcaacctgtgactttgcaaaattaagaatttcttcatggtccactgtgccgccatggcaatttagcttttgatttgtgttttgaaggaaatcagagtatattgagagcagaaatgctgctgttgaaacgtattgcatgttgttccattgccggacatagattaatccagctggggttcgtttcacgttattgctatcattatttttgttgagacctgagcaaatatagtactctgccttcgatttgtattgttcaagtatatccctatgcttcttgtgtttttcttcgcttaagaactgcaaaaacagatgaaactgtagttagattacatatacttgctgcatatgaaggcactgatacttcaatttgtttcacgtatccgtattcaatacatatccgatatgatattcttcgatatactttgtatcgagacctatgtagaactgagaattcaatttgattcacatattctatactgatacatttttggatacttaacttgatacatgatgtattcaagttttctaaaaattcaatacagttatttggtttctaaaaatttattttaaaataaatatggatgattttttgaatcgtcatacgtcatcacttaattaacatctaaaacaaaaattttaaaatatcatgaaatagatgcaaaaaaattttttatcggagatcaaacataaaattcgaatatatatatcaaaaataaaaaatatatttaaacttgttaaataaacaaaaaaggtaatttgcatatttataattttaaaactttttcaaactataatcgtaaacattccaaataaaattaaaataaaataaagacttatttggtatgattataagttgataaatgctaggaatatacatccattgatgaattaaaaaaataactcatatgggcataaagagaaagaggtatattgggctaatgacttacgacaaataaaaaacttaggcattaacttcctacaccagacaaaattcttatacacccagcactaaagtgtgaaatggcggaaatagccttgctaaaataggtttaattgagagtttgaaaaaatttcccatacaccattctgaggcgctctgagaaattgtgaagccgtgcatttggggttgaagtcgccatcgctgccgtaggagtttgcatacaccgtcgtcggaattaaaggttgcgccgccgtcctgcagtgcttcgtggttgcgcgacagaggtaagtccattgcctgtatggatttgtaatccgtaagcattgtaggaatccgtagggcatatttgtaatccgtaagcattgtaggaatccgtagggcatatggatttgcaatccgtaaagaggattggcaacggtgaagagcaaacggatcaccaatccgtgaagtacatacagatcagcaatccgtaaggtccatacggattggcaatccgtatggaccttacggattgccaatccgtatggaccttacggattggctatgagccttacggattgtcaatccgtatggaccttacggattgccaatccgtatagaccttacggattggctatgagccttacggattgtcaatccgtacgagtgtttccagctacagtaacaacgcccgaacttacctccgatgacgattccggccaacgaaacctccacgactgctaacaacgacctccacaccaaaccaacaagccaacaaccaccaagaatccaagctagaaccaagaacaggagtgagaaggaagaagacgctggtgtatgtgaaaaaaacaaagcaaaacggacaaggacaatattggcattttgacaaaagtgttgggtgtataagaattttatctgatgtaggaagttaatgccaaaaacttaataatacgaagcctaattaagtttgtccaaaagtcttctaacatagaaacctgcacagtctgacttccgtcacacattttttacccaaataaaataagataaaaaacatccgttacacattaaatattttgaagggcagttttaatatgaacaacccccaaaaaaagtgcgtcaaaagtatcgtatgtaaactttgggtttaatctaaccaaaataaaaactttggactttttttaaatgaacttagatccttctaaaactcacaaattccatccctcaactttttttctttttatgaatttgatatgtagtattagatcatctattttttttttcatgaaaagttcatctattaacttaacattaatattttaacagaaacgctgacgtgacattttaatgcaatacacatatgtaagactcactacaaaatatatgagtctcattctccatggtctcattctcaaaataatgaaactcacatgattttcaaccaataagaaaaatgggtggaaaaaatattaccaaaaaaatattactgacactccttaaaagtatataaaatttaatttttcaatattataaatgtgaaacactttaacattctatctttttttcttccatttttaacatatgattaattcctaacaaaatgcatagtgacctaaattagtttctaaaaatgttagccgacgaaaggctgccctacctcataacttatttgctaatatttgttaaaagggaaaaaaaaagagggagggagagtgtactgaggtgtttaaactctcttatttcaggtctctaacattcgcctcaaccataagccatatcactttgattgcgctgtgttgcaaagctaaagcactaactgcacatggccttgtgcttggatacactttttaattctcatatctttaatacccctagataataatactagtatattaatataccttaattcgtgcatactccatgaatgacctttaaaataaagtaccaagatttaacccaccatcattttcaggttagaaaagcaaaatctagataaagttggatagatattaaagagccactcacatgggagaagaaaaaaaatcaaaggagattgaaacaatgaaacccaaataaaatgaaaacacactaaaggatcctatatttgattgaggcttgagctctttgaaggccattattaggaacaaaatgttattagcataagagagtgtagtaagtggaaaaggatgaagaaagaagaaaaacggaagataagaaagattgtagatttgaattttttaaactgatatttttaataaaataataatattcattggaaaaaaatgaagaaaaaagtttaccttagaaaccatgagttgaagaccagcatacttaacgtcccagctgaattctgaaatggaccaaccagtgccaccaaaggtatgcgcattggaaataacgtactcaagatacattttgttgtcggtggccttgtacagccacgtggcagcccacaacaactcatccatgtatccactcaccgacgcatagtagctctttaccactcccacactagcatcataatttcccctatacttgtccccgaactcaaacaactacaaaaacacacaataaatgtttttcatttcaacaatacttcttcaaaaatgctaataaatgtcctaaagacaaaacaccattaaagaagaagaaaataaacattaggaagtgtaatagtccattcaattgtgatctctaatagtgtaatcttaaatttaaattttttctatttattagtttcttaatcaatatcttaacaaagcctattaattagccttaatttctcatatacttttcaaataaaatctcagtcagcccaattattagttttgaaattgagattgtcacacaaaagttgctactacagacaattactattaatcatgcagcttgtcaaagccaataaaaaaagcacaatcaatcatacttttaattaggacacaaagcattggctaatgactcacctgcagggcatggtgtagaagcaagtgagagtaatgtgggttggttttcctgaacacaacggaagcagctgccatggctgctgcagtctctccggccagatctgaaccaggattgttctcatctaacttaaatgctcgccgtgaagttgtcatgtcctctgggcgttgccaacaataatggtcagtgtcaccatcacccacctgggaaaaaaaaaaaaaaaaagtatctcattaattttagaattccattcaatatcttcaaccaatgcctctaagtaattaaaacagtgagaataatgaattggattgattgaattagaaaatttctatggtagcctgagaatctaagtttttggtactcttaattttttaattcaatattaatagtggaaagaatttggacacattgagaaaggccttctcgagaacaccaccaattaaaactcttgaaatttcttgtagttagtgtacctcagcccataggacatttgggctagtgtgagctttgatgaaataatcagtgccccatttgattgcctccaatgcgtgttctagttcacctgcatcttcaatttgttgcctatactctatggcactccatgagagcatggtgatggtgaatgccattggtaaaccgaatttcacatgatcccctgcatcataataccctcccaccaagtccacctacacaaaccaaaaagaaagaaaaaaagttttgattttgaaagggaattggcatgccaagagagtaaaagacaagaatttgatgagttgggtcatgtgggtattttgagaatttggacctaccccttcttctaggccatcagtgaggccagaatggtcacgccaagtgacacgctgattatagggtatcctcccagaacgttgtgcttcaaagtagagaagactctttgaaagggcatcagcataatcaaaagcttgggtggtggtggtagtgaagaaggtgaagatgaagaagataataaaacaacaatgttgtactagcatgggcatgttggaggttccaaaatggtgtttcttatgtggttccattgccccccttccctcctaaaaaactttttaggagtgaagggaaattggaaggaaaaaaaaaaaaaaagtgaagtctcaccacaccaccacaagtgaagggtttgaattgtcttttaaaagcctgagatgtgcctacgatgtatctaaaataggcagggatcattttgggggagagccccacaaaatgagaacgtgaaactcacaccaccacttttatttgttttcttgcacacaagggtgaattttgcatcacttggatgtccatctgtgtggcaaataaggaaaacaccctgctatgttgactcttgttaaaattccactgtgatttcaaggcacctattctctccatttattacaagaaccgttttttacttgtgacttgttgcaggaaccttgcatgtgtagcttgcaactcttttcatcagtttcaaatcagttacaacaacagcagtaataataataataataataataataataataataataataataataatataattaaaagatgatgctattaagtcaaaagattaatttctcttatttaatagtttctattaaatgattttaattgtttaattaaagaaatattacatacttcttttatataataaatattgtgttttatgtactctcaataaaaaaaccatttcatgtgtaacttttaaaatattcataataaaaattaacaaatttattatatttaataatttattaatagatgatagtgtaaaaaaaattattatcactacatgctaaataaattcataaaattttagcattttttaactaatatattctcagaagttttattattcaatctttaataacggggtaaaagtgttcaaggtacaggtcaaaagcattcaacacacttattaaatatattatattacttataaatactacacgttatttgcgtttttaatatattaaatgtaaaatgtatttatttaatatttctacaaaacaaattcaaagacatgaataaaaaaattattttgattattcaatgttgtaattaatggcattaatggatgcatctctaataataataaatgaattattcaattctctttgttttattttgtcatgataaatcgaatttacacaaacctgtcgttactgtaccaactccaaagagtttgaattgtttaagtctctacgacttgctttcggtagaagattattttcagaaaataaaaaaaaaattaaaaaaatccttaaattcttaaaaaaattaaaagtgcaattaacttttaaaataaaattgaacaatatccgttgagaggatccatctctctcacctgatcacacatctttaatgggaattttagtgcctacaatatttttattttaaattaaaatttcttgtagaacaggtattatataactatctaaatggcatatttgtgttatgcatggctgtattttgcacagcatggaagttgtaaattagaaaactcgtaaactaattggagtcttggagaatcccaagctaaggaattcagggttgctaagtaggctccataaatgttgctttgtgcatgcagagggtggtctatttcttatctttgtaaatagtaaacacatgccaatgtgcacaaattttaagctgagcaaaaaatggttcttttatggctaaagttggtcaatttcttatatcaaaagcgatttgcctgctgtcataaagagaacgtttggcaggccttggttcaggcaaaaactagaagtttgaaaattattttggaagaagcaaggagggtatggtgcgcgtgcccataatgtgtgcgacgcaagtttcatccacatacaatatgttatttaatcattattaatatatgttggtcctctagctcttccctctttttttcttttgctcgatttttttatatatatgatcggcaaggtttcactaatgatatgataatgattataaccatgttagtttctgttatacactatgtttttacatgagtatgagtctatgagaactttgccccatctttttgtgcacctttatttcgtctgcaatacgatacaacaactaaggagagaggaacaaaatcacaaacaactttaactatagtctataacgatattgtagtaattattacaatcactaaaaaattaaccagttattttcttttggtttttcaatctacattataagaaaaatttgagagtaaattattaaatttgtctttgaaactgaggtgctaacgagttagtttttgaaagacaaaaattacaaaaaaatctctaaaattattttttctcaccaagttagtccttccattatttattgttagtaagtccatcaacagatgaatagttatatctatgttaatgttaaatcatcttatctctatttttttgtccttttttaaaattaccagtgcaagttttttaaaaaattgtatagctaaaaaattctacagggtagaacaaagaaaaagaggaaaatttcttgggttaaaagtgaagatgtgtataaaaaagagtgcaagggtggtcttaggattaaaaatctctcttggttcaatttaaaacttaattggaaaaaaaaggtggcaatttttggttgaaaaaaaaaggaatgtggcttgaagttctcaaagttgtatatgcatattaaattgcatatagttggatggtgactactttagatcaacttcattgtagtggaaggatattaatttgtttcactaggagttgttcgagtgtgggagaagattgatttttgaagtcatttgataaatggttattaggtaatgagtgattttatttacaagcaagattagataatgaggtgtctattcataaaaataaaaataaaaagataatgagttgtctatccaattcattagagagataaagggtatattttgatcagatttgaatgaaggagttattcccaagattgtttttggtgttagaatgtaagccattgtcttaaatatatgtctcttaaaaaactctcattaactcaattgattttagagtttatgaatttagttgttttaactttctatttttcttttacaaaataatttactgttttgaaatttcaaagtctattttttttccctcaaacactagtatactcttatgtcttatctaatactactcactgctagtaatgtaagtatcaaagataagatagtattaaataagaatattttagtaaaaaaatataacgatattttactttattaagtatgtcttaattttatgggcattaaccttaattaaacaactaaaaatatgagatggaggaagtaatttaaaataatacttaatgattttttcgttcctaaactatagacattttagcattttagtattattttaaaactattgatattttatgaatctaagattaaattttcaactttttttcaattatatatttttttacaattaatcatgcattaaatttttatcgctgtctaagataggcacatgtatccaagccgataacactaatcattcatcaataagaatgtccatctagcatatatagtctctagactctttactattgaaatattaattactaatggtggttttagtaacatgattaaataagaatactttaatcaaaaatatattctatcaattaatatttttttaatgaggatacactaactttcatcatctattaagagcatctttagtggtagatcttaaacaaagatcttgaactcaagatctgatctttacaagatcttccaataaaggaagttgagagatctccaacatggagaatggattcttgtacaagatctctcaagatctgcacattgttcaaaaaagaataaattttctctctctttctctttctctaatatctcaaaatgagatctaccattaaaaaaaaaaattagagagatcttgagagatctttaatactatgtggtattatagggtccactaaaaaataatccaaaatttcaatttaagatctaccactaaagatgctctactattatagtttgagaatggaagaacaaatatttttaacaacttaaattttcattaataaaaaaaataaagttaaatccaatgtattcccgcgtaatccgaaaggaaagataagaatgagcgcgcataaaatgtctaggaacaaacacaaagctcatgatgattcttaattacaccaatcaactcaggattaggggtaacagcacgagaaacataataattactctcgaattgataaaaagtaacataataattgaatttcaaaggtcattggccatgttcctgaaaataaaactagtaagtgaacagcattacccctggtgtacaaattaacagagtaagtgtcgaaagattttaatatggagaaaatctagatagagtcctgtaattcctccagatttaaatataaataaaattaatgaatatttatgttaattaagaaatttaattaatattattaaaatctattaattacatttaatttttaaaaaatcctttaatagaatttgatatcaagaataaaaaagagacactaaaatagaatctcaattaattgaaggatgtttttgagttgtattattaaataaaataaaagtagtgaaaatttgtttatatttgaataaaaaaataattattacttatatttaagttcagagatagtagctaattttcatattttactaatatttaacatgtgtattatacaaaataaatgtttgtttcatacaactaaaatttataatttataataagttaacatttttaaatatataaattatatcataattctaatattaataaataaatatttttaacatataaattatattttaaatttttgataaatagtttatgttgtgatatattattattttaattattgataattttttaaaaataaattcaaattagaattaaatatattgaaaatgatagattaaaagagataaaaattatgttaaaccattttgttgatattattaaaagcataagatgatgtgtcatataaatgtcataagcaaatatgtatatatatatatatatatatatatatatatatatttgaaattagcttttgatatttagttacagttgttaaacttagttgatattaaaaacctaaaaaaaatatcagatttattatataaggaaaataaaattcatcacttcataagataatattattcaaataagagtgaatgtgagagaaaatataaaatgcgaaagcatgagaaaacatattatcttacacacacatgtatatacaacacataagaaaatcttaaactcaatttctaaatgtaataagcatggttattttaattcttgaatttaatgaaaaagaattattgaatccatgtctttcatgttaattttctttatcataatattggtacaaaataagacccattaaaataattattaatttttattggagactgttgacacacacaaaataagtattattttctcaacattaaattattttgttgttgaaattgtatatcaccctttaaattatttcaaatattaactcattttgttgtttttagtgaagtgcattagttgtcaccttgggtgtgtttgattcgctaaaaaagaagggattagacaatacaaaaatatttgtttaatgtttgatttaaaaatgattgaaggacaatacaaaataaagaatgattaactggataaataacccaaaacttgtaactcattaaacctccatacaactttttgtctagtatctatcaaaagtaaaaatacaatattattatcattttctgactttttattatctcacaccttttttttcttttttcatatgcacccaattctctaaacatctctcttacaatacaaaattacttgtattatgcattgattaccaaacaacaacgtataatacaaaaagttatcttaaaaagttatcttgtgattcaactatttgtccaatattattatgtctgttttatctttttagtaaatcaaacgtaatgtgaaatatgacttttatgtcctagttagtaggaactaggattttgcatgcacctttatatattattgtgcctccattcaacgaattttcccatttggaacaacaaatcaattttaaaactcaccttgtaagcttttttaagatgacatttcgcttcccatccatcattatttctgatctcatatcttacttgaatcacccatattttaatgtgacatttttttatagaaacaatatagataagacattaaaatttaatttaatcttaatataaccattcaaataatatttaatattctaggtttaaaattcccatttatcatcatattttattttaccgcataagagtctcatgttatgtactctctctctatataataataataagaaactcatgaaaaatctcatctatctacatttaaacctgttccttgtactaacatttttcttgtctttccctttaccaaaaaaacacccaactaagctgaaagatttaacttcaccttgattaagacaggactgagttaaggaaattacatatatgatatattctttatacgatagttaattttgcttcttgacatgcaccgacaaaatatattccatgatgcaagatccctgtcattgttccttcgaatgttttgtttgcatcagcccattaaacatcacgtgtcgcatcacatatattgagtagaagaactgaagaaggcttacaaagaaaacgtgacaaattcagttttcttagaatcgtgtctttttttcttccccagatcatgacatgcaccggtctgttgattatttgacctaataaatcacgagtttaatttatacattttgttaatacaaaagaaattacactattaactagtctggaattcaggatagatgtaatttttctgataattattaaaaataaacaaatttactttattattaatttgtgattaaataactgtaaataaaatttatagttgtctgtatattaaatcattatattgtttttcttttttttttttacaggctggacaaatattttgtgtgtatgatgcacatagaaatgtaaccgattgccgtaagtatttcctgtatttataattctttatattatcattattttaattatttatatagaattactattgtgccactactaaagggatcccttatgaatttcgaaggccaagatttgacgttgctgatattaaagacgacgaccattcgcctccgccacgacaccaccacaaccaccatactctaccattatcaaacacaagtgttctaaccttcctccatcgttttattttaagaaaagaaaattgtgagttaaaacaagaaaacaaaataaaggttagaaaatggtgaagccaaggatagatatgctgagatcttttcactctgccacgcctccctcctctcttgccatggctacagcaccgagtcgtgatgtttctcggaaccaccggcgagatctgaaatccctctcatttcgagcctcgccctttacaaaatctttgagatgttgacacgacacctatgggaccctcgtgcttggacttgccgacgtgctacttctgcggtattaccaccaccgtgaacctaatctttaatggtctaggagccttactgggaacaaggggatgaacatgaaaaggagaaacacataatcacaaaaatagggtcgaacagattggtgtcattcaagaaaaatcctggtttttaaatatttaagagaaaaagtagaaataaaaaaacttttaactagctagaatctgagaaatggagtgaattattggagaaaaaacacctgattataaatgtaaaataaccaatattgcgaaaggaacctaaagttgaagaggtctattaacttaatatttttaattatttattacattctttatcttattatgtaacaaggaaaaaatctttatcttattatatatatttttttaaaataacacaaatacattttctcatttgttttcatacttaaattaatacaatttcttattaatgtattaaatagtgcaacatataaactacgtaaccataaataaacccttatataagctttcaccatggatcatgacaatattctttacgtaattatccccttatttctggtgacagctgttctgatacgacctacattctgttttggtcatctcaactacgtctaggtttcttgatatggagactttccactgaacaaataaattaacttactatagatttcggaccatctcaactacgtgtaaatggcgtaacttaagtcttaatatggagacttaatttacactgaataaataaattaagttactagagtttagtgcacgagacttgactgataacaagtcagttgcacacacattaccaagcatgataaaaattaaaatattaattgttttcttgtataataataagatactgattttttaacccacttcctctcctcctttcttttatgaaaaaccctatagggatgaggagtctacatcttctacaaaattaacctctttttcaaaaaaaaataatccaaatcgaataaacttttaatacacactttttttatacgttttttaatacacatgcacttgcaaacaaagaaaataaggaagatggactaaatttcttataaattaaagtcaattataaattttaatttttgaagaaaaaaaatagaccagagaatttctaaaaatattaaaacacataaattaattttttatttatataagtagtttaatttatttaatttttttatatccaggcttaagcattgaattgaaaatctgtacaataaaaaaaaaatgaattttgaaatctcagataagttttcttttttttggtaaacatatagttttggaccacaaatacatgcatgttacgagatcatgttcgtagcctagaacttaattagaaatgtgctatggtactcgctcaccgactgttttatatcttcgaaaacagaaaacagttcatatttgtggatatcccaacccatttatatataattaaataaatacagtgtcttgctcttacatgtgaaccaattaagggtgaagttggccagcccctcattgtcaccttatagagcagagactaagtcttcgtaatttcaaaatcaagtgtactttagcttctagttagaaacccaaaataggtagggattctttggttattaacaacagaagaatgaaagtttatacatcaaattaggccttcattaattcactgtgtttataaagtggcggtgacgaacttggtttggttcataattggtccacacgttaagaccctgcctttaaatgggttggtatatttaaaaaataattgcggggcagacccaactttgtgaagagcttggggagatactatatatatatatatatatatatatatatatatatatatatatatatcagtcggtgcatttcgtagcacaatttttaagttctaactcaatgtgtatgtgtaggccaatgcaaccctatcatcacatgtacaagtggtccaaatcgagatctttggaaaataggaaacttcatggctgaaattcgatattttttagtttacagatttcaaaatccaaattttaataattgtggagaaaattccagaaggtatacacttaaacattatacagtttccaatgagaagaaaaaagattgcttttgtcatggattttgtgtgcttgtattgtgtgagtaatcaatttttaagactcaggagtatcttattactaagagttcagtgtctaaactgcatgagcttgtacctctacacagctttagcagttttttaacactaaatgataatcaaatatacaatgaaaaattgatctcttttatttctaagaagtttttcttcttaacttgtaattggaatagagtctcgggaacttaggggttagggcatctctaatggagaaattaatgagtttctctactaaatgttttataatattttatattttttataatatcacaccacaccacattttttattctaagtaacttagtcaactttttactctaactaagaaattaatttattaaagtttctcaaatcaatcccacaataaaataaaattaatattacaatgatacatttaaagcaagcctcacaatttggagaagaggatctgttcctatgcaaagcaaatccaatcttaagcgaattccactcaacgtctctccaacgaatttcacaacattatatctctatttctcacctctatacctatattcataatcttatattaacttcagcattagtgtttttacatatatgacatccatgccttggtgacaacaatatatgaacacttgttagaggactatagcattcatcaaagtcatgattatgtacaagagtccgtgctcccttatactcttctttcccctgtaccatgcattttgtttctcttgaaacaagatgaaggaaaattaacttcaaaacaaaaaaaaaaaatcacatgtccttttcttggtttagttatcaattaatttataagtcatcttacaaaatttaaatgtaaaattattaaaaatattatttttataataaaaatattaaacttactttaaaaagtggttttgattaaaaaaaatgattaaagtaatgtgtatatttttacttttttttttgtcaatagtgtatgttcttacctttacgtctatcatttcttattttttatttacaactaactgcatgtattacattattaggtaccgctcaaaataagtataatggctgacaagaaattctaaagattaaatatttttacagacatcacacgcttaaataaatagcatatttaatttggtttattttaaaagattatcactttttacacctctttaaaagactttttgctaatagaaaataataattttttaatttttattaagtcgaaacatacatgagttgaacttactcacttattaaagatattggatctaaagtccttaataggttattcaaagacatactaattaactaggtatttaattagaccaaataatcaacaaatactaacatgtaaagaattattgacaataataagtagataaagtaaactatatgacatgaatttaacaaatgatttatacaagttggcgatagaaaaacactaacattatactaaggataaaatattttaagttggataaaaatatcaaactaatacttatttaagccaacttactcaaagtacaaatacaaatcacatgtcaaatgaaaaatactggagagaaataacagttatcacttctatatagttgttataattaataactagttattgacctaattagaatatttacaaaatataacaagtttatgggattgaaataataacaaaaaaatgttaacattatctctatttttcatatctattaattatctattgtattgaacaccaaacgtgtgaatcatcaattgacattaaattatattaacataatcaatgatttcaagtttaaacctgaatatacaactatatcaatatttaaaaggaaaaattttattattcataatagtcctatcgatttaaataagattgtttattgtgaaaatatgatttatacaaaaatattatattgtcaagagccacatcactaaaataattgttattattattataatgaaaataataaatatacaaattacattaaaaatattgtatacaacaaaatgtttaacagattacttcaatgaattacaatatttaataagtatatttcatttttttcaatcctaaatttattcaaaattgtaaattaatattatctatcttttaaaataaacatatttttaaaaaaatatttataatgaaatataaacatataaaaaatttattattttgaagaatatgaaacagaaagattacagaagagaaccggggtcaactatcaagactccttttttttttttttatattttggacccataacggttttttattgtccatacatcttttgttttcaatccagacagagtattgtatacaacaaggccgagttttgtataaaacttgggccaactcaactgaatatagacaactacctaatacaccccaatttttccgtgacgcacctccaaaaattttaatatgcctttctaaccttcttcttcctttctcaaccacctcctgcctgaaccttcaccgactcaccatcactcttgcacccatgcaaccaaatacaacaccaccatcaccaaatctaataaaagtatttttttttggtaaaaatgcacaaatataagtataagatagtatgttgaataaataatacgaatttaatacatatttttctatcttatgtgcataagttcaaaaaaattaaataaatactcttcaatatttttaattacataaagataaatattaaatgttttcagccaaaatttctaattatatttccttaacttatatacttgatttataagataaaaaaatgttattacactttgtctatgttgaataaataaatatgaatttaatacatatttttctatcttatgtgcataagttcaaaagcattaaatacacattcttcaatacttttaattacataaagatcaatattaaatatttttcagcaaaaatttctcattatattttcttaacttatatacttgataaataagataaaaaaaattgttaatacactttgtctacagtctatgcaaaaaaaaaaaaaaaattgttaaaaactaacatgagttaaatctagaaaaaaggattagtctctcacacgtaatgaacaatgtttgaattcccattggaagagattctcacaattattgtctgaccatatctctcatttacaaaaaaaaaaaacagttaagttttatttataaatgaaatttaatgaccatcttataaaattccatgttgaagtatgatataaaatattgatttcaaaataaataatgattaatttttattaattatataataaatattactagtccccttacaccttaggaattcatatctacttataaatatttttttttcattacaaacatgtatttatcttaattttaattgaaattttataataacatattctttattaaatttaagaacatataatttaatatactttatatttttactctataaaaaactaataacatttttttttgtgtgtatgtaaaagttgagctttaataattttatcccggtgtcactttgaaaacgtatatgaataaacatgcatgtattggattgaattattttatccttaagttcaacattaacaatgaagttgtaagacaacacaaagaaaatattcataaattataatgtgtatttttctttgtgtattaaaaatattctttagtcgatgaaaaaaataattattttagatttagagattaatgaaatgaatttatttttgccaacatttttttccaaatataaatcaccgtataaatttgaatgagtatttgtaatcttaattataaaaattaatataattagctttaaatttaaaatgatttttttaattttaatttaaaaaaacgttattatgaaatttaatatacttttcttaactcaaaataaaaactatacgagttccttttgttagaatagcctttaaatgcttttcaaaacactcactaagcactttttcaaacataagaaaaaaattaaataacaagatataatataataaataaataattgagttttttaagcatattatcaaaaattcgattattagtcatgtgtatgaagaaaaatttgttgacaaaaataaaatatacttcaataatttctacatttcttgtcaaaaaaataatctacgcatttcaaaaataattactcttcaactatcagttagaaaatatctttaacgaaggaaaaataaaattaataaatatgattaaatactctaattaaatgggtatttgaaggttcttggtcagagaaccaaataagttaatataatttctcgtatgtttatttaagatgtaagtgagacaaattaatggaagaatttgacttttgaatatatttttaaaagcaaaatatacttttggccaaatttaagtttaatgttttaatttgtttggatgatttttttaaaattaatttatatatattcttagtacaaatttgtgacttgaatataattttagtttcttaatttatattaaatttatttttagtctctcatattcaaaattatttgtttttatccatatgatattgactcacaaaaaaaatattaaattttgtcgttaaagaaaacaaaaagaatattaagggattatttcacattataatcttaaaaaaaaatccaagataaaaagatgtatcatatttttttaaaattaaaataaccggttaaattatatgataatgagtcttacaaaatgtcaagtttcacaatatcttataatataatataagttaacttcttcaaaaaataaaatatgatagagtcatttataagtatttagttaagagtaagtgtcaactcactttcttgactcgtgttctaactatatctaaataaaataaataaattattgcgtcaatgtaaaatgatgtcccacacttattcaaggcatgctttacaagtatttgtttaaagagtgtccaacacactaactcatcaacacacattttttgctcaaagcatgtttgacaagtgtttgacacaacaacactttgactcataacacgtcattatgcttaacgcatgtttgacaagtgcttgacatgccaacaaatagacacaccgacacaccaacacgccaccattctgcttaaggcatgtttgacaagtgtttgacatgccgacacaagttctgcataggtttttataccttatagaatgtcgagtatatataaagaacaccttgagtttggaggtggagaaaatgttgaatatcatgagataatccaacttgatgtcggaaccaaatgagttaattgtgattaggagaagttcattgctttgggcatagtggaacattgatgttgaagggagccaccacatgagaaaatcagtataattttgggttggttgttcctggtaggtgtcataaaagataaccttacacctaatttttatatattcatgtgtaagatatctagttaaagaatttaggattaaatgcacaatggaggtcattctagctagaaagagaatgcataggggctaccttttatcatatctaccagcacaatcaacctaaaagtgtcatgcatcccttactcggtggcttgcttcaactcgatgttaatgctctactattcccacctaaggccacctccaaaacctactagtactaaacatttttacacgttatgtgaaaatttggcataacaagatcaaatgaaaatttaacatgaaaaaatccatgcctaagatacacacaaatttggcatgaagttccttgtattttaatcaatggtttgatttgctttaagtagttttgagttttcacttgtcgtgctctacttttgcagtgcaatttagactgtgtcgggattggtaatgtttccttctcattctccttgttggctcgttgtgaatgccttgtcttgcagctgaagtgtgaaactatcctaccattatttcaaaattatatattcaagctgggaacaagtatgatgattccttcattaattgttcatgccacgagaagaagtgatgtgtgcttaatttctgctcgtgtaaaacaaatcttgcttttgaaacacattttttatgaatatttacttgttactgactgtgatttggttggtcatataaccagggtgatatggcttggtaatacaaattctgctctttgtagctggaattaacacacttctccgaacacctttggaactaattgcctacaaaagttggaggttcatctgcatatatactcttccagttgcttatattatcactgactgcctacagaattatatatttccccattccatttgttcatcactggcaatctgagagcaactatgcattgttttcttagtttgtaacatctaataaatgattatgggaaacattaacgcaatgatagtcatttgtaagtttttttgttttatggattttatccgactttatttggactcattttatatataggggttagaatgtgtggatttgtatagtttttgatgaggttaggagctatggtgatcctcttaaaaaaaggagctatggttgattatagttatatcttgataggctgtattaaatatatggactatggtgtctgcctaatgcgttaataattctataattgaaccttcaccaaccttatcaagatgtgctaggatcttctaggttaaactttttttttataatcttattatgatgtttttaaaaaatataatggataaattatcaatatgacatcaccactcctctctaatttcaaaggtgaatttaaatttgaattttatttgcctttatgaatatataaattgatagatgcctaacaaagctatcaatatataattctttttcgatacattaaaatcaagacagaaagagtttatataataaaaacaagaaagaaacagaattttaatgatagagattttcaccagagagaattcaagtgaaaattttaattaaaaaaaaatattttcatgtacatggtgatttggatcccctcatgtctatttcagtctaagtttaatcaaaatcttaacccttaattaaaagttaacattaaaatcaataatgacgtttgattcagaataagtggtcctacatattaaggataaataaatttttagtcttttaatttatttttaaggtttagtctgattctctagtttattttaaattcaattaaatttctcaatttttaaaatttgttcagtttctgtctaaattaaattaatagtgttaagaaaatgctaacgtccttgattaagaaaaaaactaaataaactctttcgattcccattcttgtaaaggacagaatgaatttcgaattataaaagaatgcgtttggatttataaaaggtggaaaaaaaatatgaaacctaattctatctttatcgacttttatagggtttaggaacattttttgggatacccatctcaaactttttaaaaatttatttattcatacattttaaataattacagattaattattaattacattttaattcaaacaatatttataaaaattaataaagaatcaatattgtaagaatatttaagaattatattatatttttattctaatacaaaatttttagttttattatttaattagtattataattataatattatttagttaatcattaaaataattattctatattttaataatgataaaatattaaaataattacattaggaacagaaaaagaagctgcatcaggaagcagcaagaaagaaataaaaataggaggctctggaagagtcttaaacaaatacgagagggacaagacactgctagctaacttatcagcgacacttgaatcctttgaagtttgaacacatactggaacatgcaccccactgggagacgcaacagccttttgatttcttggacaatgataccaaaaaaattatatatatatatatatatatatatatattaatagaattacataatatatatgtgtatatatatatacacattaatagaattatatataaatgcataattatattattaataattacaaatatatgcatagtaggataagagtgacatactgagtcggataaaacccaaatccaattccgatcaaacaaattctcatggattgatgatgtttttattgccatgcccattttgaaatcctaagttgaaaatttaacgattccacgcatcagatgacgatggaaacagagttattcactcacagaaggtaccatttcgaccaaattattatgcatctcaatgggtgccgtacagtcccatcaggggaccatagtgacgcacagtgcttcgctggtttccccagtaaggacacttcaacttcatagtcgaatatcaatgacccctcttgggaatttgtgggccccccacactttcctattcaagtattcatacacggttattaagggctagtttcgtaaaccacgtcgaatttcaaaaccaaaaaataataactagcttatcgatcacaattgagggtgttatgttacacttccaccctcacttcactctccattatttgactaataaatatttatgcttttttttcactttataatttattgttgcactttactttgttgagaattcttcttcatcttcttcctcatcatcctttcctttttgttctttcgatacctctttgtttctcttcttctgaagctacaacaatggcagacattacccatctccctatggaacagcttcaggaccttgaatgctgcttagactctaatcctccttggggtatgctctctctccctaatttgtttttctctcttattataatctaagagttttttctattccttttcatcattttctgttgccatctgacgaaacaagggggctttttcttttataagcaaaaaaagggtgcttgttaaatatttggatttgaacttaatgatcattagggggtaaaattaaagaaagaggaagcttgcccgttttgtagtttctccaactttagttacgaacccatatggatgaaatgatagaaagcttttttctttttttgtcttgaagccattgcatgagctgggttttcttccatttggtttgttatttttgtacgcgttactccaaaagtttgagactaggctatattactttgtttctggttatatggattaaaaagttgagatttttatgctattttagatagagtgcgactttgaagcttgaacttttctgttttagtctttttctacttgtgttagtttttaatttaaacataaaatgtgtattataatttaaaacattctggttttttaaatagatatatagaatttctgtttctcatcatcattttaacatgtcctttagcgctgtgagatagtgatcactatttctaagaaggcttgcaatcatgagtcatgaccattatattgtaattaccactttaccctacttcttctggcctggttaatgaaaaaaaaattatacttattaatgacgttagattcagaataagtggtcctacatattaattatgagaatcaaccatttttaccttatgtgttgaagaaattgttgctacgaactacaaagcacctactctgattaaattttatgttaaaaaaaatctcggccttacatgttaaattcatgcactttttattcgtttcgttcgtaatagcgtgactctatagtctatacatatatcaacatgacaaaactttaaattaagaatgaataaaaacaaggttgttaagcctttcaattttcatatgataatgactcacaagaataatactaagggatcatttcgccgtgcaatctttacaaaaaaaaaaaaaaaaaaccaagataagaaattcttaaaagttaaaataacaagttaagttctatggtaatggggaggaggtataaatttggtttagtggtgaacggagaaagaaatgggggtaaaggtgatggtaccgagcaatcacacaacaatcgagtaaacaaaaaaagagaaagggaagaaaaataacacaaaatgtttatcctggttcacccaatgtgggctacatccagttattctctatatttttttcacacactcgctacaatgcactcagattataaggaaatatataggcttagaaaccctaagcacaatatcttttatgatatctagcagaacgattgacctgaaattatcatgcattccttactatgtgacttgctttagtgcgaagctaatgctctaatattcccacctaaggccgcctctagaacctcctagtactcaaacattttttcgttttgtaaaaatttggcataacaaggtcaaatgaaaatttaacataaaagaacatatgcccaagatacacacaaatttggcataaagttcttggtttcttgtattctaaccaatggtttgatttgctcttaagtaattttgagttttcagttgttgtgatctactttagcagtgcaatttagactgtgaggtgggatattaatgtttccactttacattctctttcttattggctcattgtgaataccttgtcttgcagctgaagctatcctactagcatttcaaaattatatattgatgctgggaacgagtgtgatgattccgtcatggattgttcatgccatgggaggaagtgatgtatgctgaatttctgcttgtttgtaaaacaattgttgcctttgccacacatttattgcttatatttacttgttggtgttttggttctgatataaccagggtgacaaggcacgggtaatacagactctgctttttgtagctggcattaacacacttctccaaacgctttttggaaccagattgcctacagtcgttggaggaggttcatctgcgtatatatatccaattgcttatatcatcactgacttgcaacaaattagtgactctcatgaagtaagtttcctcattccgtttcttcatcaccagtagtttgagagcacattaaactatacattgtttttttgatttgtaacacatttaataaccatttgcaatgataatcctttgtcctccgttgattttggaaccttgcatacctatatgtaactataagcactgaatcctctatgggagcttttagactcgcaacaatcctaaacatataaccaaggatttattattctggacaaaattcaatgattgttcttgagtgaaacacactgggattttagttgtagatatgctaattattgatcaccaggaaaatcaatatttagtttttaccaactttgctctatccatagtatgaggttgtcagtgaagtttaaaatgagaatccactggttttctgtcaaatggtaataggttagccccagattataaaattcaaatttagtgtaaagaaaaatgctagcggcataccttttgacatgctctttctagcacactatattattgtttgaaatttattggaattcatgaaatcttatggatcctatgccttattcaatgagttatgagtctcacatgattttgtgtgtctcagtaaatttcaaccaataatagtatgttctacttactagcattcctcatagcatataatacttttgctatcatttacgatttaaacttctgctgaatatttggactttgttttggatcgatgacatataatttggggattgataggagatcaataataaaaagggtgtacaccagttgaaacaggcagcacagaggattttgccatctttaattgaatgtatttcattggtcagtattggttaggacttaggagcagttagaatgcgagggggaggttaaataggagtaggagggaaagaatgaggttggaatgaaattaaggttggaacaggggagaacatttggctatctcgataccctgtggactaatacgttgtatttcatgttcttctatatcacattgatcagagtaaaagcctactgaataatacatcctactgttctttgttgatcactatattttcctctgtactgatttggttcttatctgttggtgtcaaagctttccaccatgtctctcagctgcaaacaagcgactcaggtagtgacatcagcattgcagtgttgttctaggactagtacactgccatcccgaatgggttctgtggagcgtggtgggatgttatgatccaattgaaagatatgggacttgagtcccacattggaattatggaattttattaggaggtttataaggcctcaggctctctaattacaattactagcttttgttgtgtgattctcataaggttcttattagggagcaacataagttatataaactttcttagaaacacagttagatttctttcttatttttggtttaagagatctttccatgtgattggtttgcagagatttatacaaacaatgcgagcaatacaaggagctttgattgtagcatcaagtattcagataatcttgggttacagccaggtctggggactcttttcaaggtatactagtatcatgtcacgtgtttatgagttgacaatttttaattaaaattttgaagcatttttgttttgtggatcttctatccagatttttcagtccccttggtatggcacctgtagttggattggttggattaggattatttcaacgtggattccctgtggtaggtgtggctcaaatctccatcttaattttcatgatctcaactaaaattgtgacgaaatggtctctctattgacagcaatttattctgaatgatgataaataataatatttaaggaacttatcttgaatcctatctccgagttgtcgcctatttaagtgaatccaattttcattgctgaaatttgatccttgttttcattatatatggattgagggttgtgtctacttttcatcttatgaattatttggtagcggcatatgcttaatttgtatacagatattggtgacattttctgtagaaaaatcctttcattcaacatgctaactatatttctgaattatttgatagtggcataatgcttaagttgcatgcaaatattgatggcattttcttcttcagaatcttgtaattgaccatgctcactatagcttgatggatgccatacatttcataacatcataaatttactcaatgttctttattattttcattttcagttgggggactgtgtagaaattggtataccaatgctgttgttggtaattggtttgtcacaagtaagtgctctaactagaaaattgtggtttgcatcaaattataattctttccctaaggcaaacaattttgctataaattgcagtatctaaagcacgtgagaccatttagagatatccctatatttgaacgttttccagtgttgatttgtgtcccatttgtttggatctatgctgttatcttgaccgccagtggagcttaccgacacaagcctgacataacacaacatagctgtagaacagacagagcaaatctgatatcaactgccccatggtacctgaaaaaacctgttctaatttcttctgataggttcaaaggttttgcttatttctgaggttttttcttcttgtactaggttcatgttcccatatcctttccaatggggtccacctacattttctgttggccattcatttgccatgatgtcagcagttattgtctcaatggtggaggtatctattttctttcctgattttgtttttatttttctggttgacttcagtctcacctgcagagttagtgtttgtatgttctatcccagtacttgttagttgttactacagattcatattttaaaatttgaccaaggggtctcaggccccaaaaaatccacaatgactaaagaaacaaaatactgattacaatcaccataaattgtctcattgtagtttagtgaattttctatattgtcttgacatcttgaccatgcacttgtggcagtcaactggtgcatacatggcggcctctcggctagcaattgctactccacctcctgcatatgtattaagtcgaggcattggttggcaggttagttacaaggcacaagtcatttattattattgaattgcctagcttatgcctgtgtattaatttgaatagttttaagacttcaatcccgtgaccagtctttaaaagttaaaaatattgtagaggttgatatgattgagagatggaactgattgtttattttatccaggggattggcgtcttacttgatggtctttatggaacagcgattggttccactgtttctgtgtaagtctaactcttcattgagttttaactgcatcagcttcttgtgtatgatccatgtatctttctatagtagcttgatgagcatcatggttgtttattctagggaaaatgtgggactccttggactaacccgagttggaagtcgcagagttgttcagatttctgctggctttatgatattcttctctattttaggttggtagagacaaatcgaagatgagcctggattacaatagaagtaaaccagttcttcatcatgttattcatggaaattgttttactctatgataaattataaacgagaaaagatagttccacttacctgagttttttttgttttctttttctgtcatcatctgtaggaaaatttggagctgtgtttgcttctatacccttcccaatatttgctgcactatactgtattctctttggccttgtgggtatgtcatgtaatctgaactgagatttgattgcaatacattttctcttgttcatgtatttacaattacattcccttgttcaccagcttcaattggaatatcgtttcttcagttcacaaacatgaactccataagaaatcttattatcattggactcacacttttccttggaatatctgttcctcaatttttcaatcaatactggactccctcacgacgtggccttgttcatactaatgctggatgggtgagttgtacttttcctcagccatctatattatgctttatcaactaacgtgttaccatcatgttatttgtttttagacttctttcaagaaatttatactttcaaatttttgttttgatatgtaacctaacctgttctttatacttgtcaacatcaatagccttttagtagtttacttgctcttaatgcaaaattttcatctttgcagttcaatgcattcttaaataccttattctcatcacctccaacagtgggtttgatagtggcagtgtttcttgacaacactcttgaggtagaaaggtcaaagaaagatcgagggatgccatggtgggtgaagtttagaacattcaaaggagataatagaaatgaagaattctatactttgccattcaatctcaatagatttttcccacctacttgatcttaatgaagatgatcagggtaggtaagattttgttggagttgcacattccagcattcatgagttaggactaacaaaagctacttttctttaacactaccaaccaatttttttgtggaccgcatgtgaaatcttggtccaacagtggattctaatgcatttggtccatgatccctagatgcaataattgctacttgctaatgagtaatgagttctgttccaagattttcatgcctcaacaacaactgaatttagtgaatttactgtatagttttctttgtccttctgatttagcatctttttgtttacgtacgattcttgatatttcatttgcaaacattaatagaaagcagagcaggttttgcatttattagaggtaaaaaaggaaattgctgactgaaaggtgttacaagcccaaatcgaaaaataaaaaatgctgatgcctggctccgaggacagtctttattttgcaacaaaattactctctgaagttgagctggaataatatgaaatgatgactctgactgaagccttgaatgccaccacatgttatgaaacgattcctctgtctaaagcctagaatatttttttgctagacatattgtataggttgatagccttcaacatatatatatatatatatatatatatatatatatatttaaatgtagtctacttcccttctttaatttagaggagtgtgactgtgttattaaggggttcaagaaagttgaaggaaagaaaaggaaaagaaggaaagagtataataaatttagataatttttaggtggtttggtggcaaggttgcccaagggtatgataattaaagtttaagctttttcgccaaccaataaaattttgtttttttttattatcaattttttaaatcataaaaagttatatatgttaagaaaaaggtttgacaaataaatattttgttatttatcaattaccaaatggaggaggtattattttatgatttttttttctgttctttcgtctttcaatatttccaaggagtgtaaggatgaaatgaaatgagataaaatgaatacaaaaataaatatatgaaattatggtaaagagctcagtgccctgtttgtttcatggtttttagaactggttgttttagaaaagaaaaacatggttggtaaaaaatagtttttgaaaactgtttttaaaattattttagtttttaatgggtgacaccacaccattgtgattctcctgtcagagctcccttaagttcatgttctcattcatggtcatctccacatttgcaccaccactccgatcatcatggtcaatcccttctacattgccacaaaaatctccaagcatctcaatgcttccaaggctaaagtcgtcaccacctactccatccatttccacaagctcaaattcgtgcaaacaaaatttctattaaggtttcgtttacagtgtgtttgatttacaagatagaaataaaagatttttttttttttttaaattaaagtgtagaagattcgagactcacataatttcttttctatttcacttctttttttcctcaaccaaacacatccgtagaattttcaaaatcaaatatatttttttatatttagattttgaaaactaaaagtaatttttaaaaatagaaatcaatcccatccaaaatatctcaagttattttggatttttattttgagtttcaagttattcatgttctttcttgtactttaacatattccttcacttgtcactaaaaattagtttttaaaatctataaaacaaaaacacaatcaaacaccttaaataaaattggatttatatttcatttcatcttaaaatactgtataaaattaatttgtttcattttgaatatccaaacaatcaaaattaatgtcattatgtctcttttcatcatagaggctatgaaacccatcttaaatgttgtactcttgatggtacgcttcatataatgtaccaattctcattgaattaagcattggtaggtagataccaacaatttttccactgctttggcctaatacctacacaatccaacttaccaatatatatatatatatatatatatatatatatatatatatatatatggaacgtgactcaattcaagatcacaaacaacctaactaattaactcaaattgatttaaattatacttgttttatatttatttatttatacaaaaataaaaataatatggaactaatgaaaagaaatcaattatatgaacttattaatataaaatatattatttaatatatatatatatatatatatatatatatatatatatatatatatatatacatgcattaatgcatgtctgtgtgttttttaatgcatttttatgaatcaagtttaacgaactaattatgaaatcgaatcttgaattatatttaagttggttccgttcgttgcaaatttgcaatcctatgtaaaaccaatgttctcataaatgcgtttagtgtgtgttgaacccatttttattattttcagcttttcacccatacttctatttcatgttttttaaagatatgcaaaaattcatttgcaagatatggatatatacatgagagttaaatatataaattctaggtataaaatttcctaactcgtaacttcaacaatatattgcagacgaatttattgccaatatacataaactcttttttcagttggattgtattaacaatgtactctaaaatatttaggacttcttttcttttaagttaagaatattactgtaattctccttttaactttttctagataataaaaaattaatttctcatcctctttcacgtttttggaaacagatcccctctttcctattttttcttcgtcttctcccacccaaccaacctcccctgtcaagatctcactggctgcaacagtatacacattgcaaaaattgtgctcataataatatcttatacagtgaatcagatcaattgttaacaaaatgatacaatttggtggaattgtaagtattttcaattgttacgctgtgctacattagaaaagcataataaattactcaatctgctccaattgcaaaaccaaaactcaaattctcatttatttttatgggttggtgggatttggttgagagaaatcactatcaatgactccaaatatgttgttgcataaggtaagtggtacaaatagaagagaaggtcccagaccccagtcactgaagaaaaacatttttatttttcagtacgtgaatcagagtgttacattggttgcaacacatcaattcgaatctactcaaattctcattttattcgttctccgttgtcgctctcaagcatgctagcgcataagtagaacaccaaacgtgcagatcggcgttgcaatgtggctcatgacaccattaaaaacgattgttacggaggagagaaaatcgactattttgtttttctttaactaaatatctagaattacgcactccaactgaaaaggagttatgtatattagcgtgtgtatatatatatataaataaataaataaagagattaacttattctaaaagcaactcctcttttagtcttttagaattactgtcactattatcatttattttcttaaaatataatgattatattgaataattaattttaactattaaattttaagaaaatattaagatagagtaacattttaaaattatttttggattacattattcgttcttttgctctctctttacatatgaatttgttaacgtacatatttctattttttattatgaatacattattaaactacatcattaatatattttaagataatctttaattataatttattttaatgcactcatactaaaaaatttcatcatattttctagccatgtctctcttctctatcactatcctattttaatccactctttttcatttgctcttaccaaatagaatgttatattttagtctttataaatcatccaaattataaaaatactgagtgaggaattttcgtcaagtatcatatcatcaagtgctacataaacaaaattacaatatcatcaaaaatgatacggtcatcatttaaaataacaaggagaatcttagatcatctttgttggtcatggataagaaacaattggtagttcacaacataaacttgatagagactagtttatatatatatatatatatatatatatatatatatatatatgcgtgtgtgttatatgtgtgtaacgttttatttaaataaaaaagtctctcaaaatttagttgagccaaccctgcccttgggtggttcagagttaactaattaaggtagtgcatgcaacctccatagcaaacaagttgcttgtggaagcatcttacgttcgtgaccataatggtcacttgttgcagcctagctatgcttcgtttctgggagagtgtaatatgttgcatgctgagcttaggggtatgttgtacgaaataaaacatgtttggaaaagggggattcgtaatatcttcagagtctgactctttaatttaggcgatcaatctcctctagaaataaatctcatgcatgctatatatgctttggcccagatccacacctcgtacagagagaagggagttgtttttcaatgggatcacatttctcatgaagtaaatcaatgtgatgatgccatgagcccatgacaaagtttggtttatatattatctactagttaatgttgttccagatttcatcttcctttattttactaaaattttaatattagttttgttttttccatcgtggtttttgagtttgggaaactgctaagctccctttattcaaaaaaataaaatctcatcacactttggataactttgaactcatatgacaaggagatcgagatgacaaatagaggtgcccttcatgaaacctttccgcggctaccaagatgtttgacttcattaggttacgagtaaatataagcaaaattgagagattaaaggattaaatacttctatttaaaatagggagattaaaattacaatattgagaaaaataagaggatcaaattttaattttggccaacttatttcatgtaattgattatatttataattatttgttatttttcacaactaattaatccaggtaaaattagatagatttatctcaaggcgtacaagtaaaataaatatatttttaattacttattttaagtttaaataaactgttaatgattgttggcgcagtggaccacttctatttccagtccaagcatgatacaatggagcgctaatgacatattgtcggtaaaacgtttcgtagccatttttattgtcggtaaaagaaatattaattgccactaaaaatcattttgtcgtagcgtagctaaactcaccaaacactttgagttcaatcaattactttatatattttcaggtttttaattcttaacttttaccttataattaaacattcagccgacttctaaattttcaattatatacgggtttcttttgtcaaatgtatccttaactgttaactacataccaaataagcaaatagtggatccgaatactacatttgtataaacaacaacacaaaatataggccataaaaaatgttttcttcatataatttgaacgtagaaaatatatttacattatataaattggatgcaacgttaggagtcagaactgtgcaaattttttctgaactccggtgatcctagtccgtgcaaaccttcgtttttaataaaaaagagaagagagtttaactcagttccctttcaaaattacgttgtacttgctgggaataattaaggacaaagaatggcataagaaccatgtttgcctccaataaaacgtggtgaaaagatttatataaggaagcgcgttatcagctctcccagaaaattaaaccagttgaagatggctgcatcctccctcttcaaacttctcctatcatcaataattctttgcactatgttgcagccatacacacatgctcttagaaaggcaagtatctaatacagttgtctgtgtttattttcacataacttcaactacaaaattcacattttgctgttggatatactatttttcacatgtttatgctttgatttgattctctttagcagacctacattgtatacttgggagagcattctcatggtccaagtccttcacttcgcgatcttgagtcagccacaaattcccattttgatttactggcatcagtcttaggaaggtatataaaatctagtgtattagttcgaattctaactttagtatataaagaaaaattggttggaagagaccaactaacctttgcctacctttaaaatctttgaaggagaattgtctcggtgaaaaagctaacatactttggcaccataaatcaccaagacacaattttactgttctgtcagggcgagtcctgagtcctctacctggactggactcgttctcattccatgcagtcctatggtataaaaaaaataatctttattctgtgacgctagctagttgatgactaaaatatttttgtttgtttattattttcacagccacgagaaagcaaaggaagcagtcatgtactcgtacaataagcacatcaatggctttgctgcactacttgaagaggaagaggcgtcagagattggaagtgagctaataaatgaataccatggtttcttttagatcttcggtagtatatataaattataactacgcattttgatgctgtacgcatatatatgtgtttggatctattggtgcagaaaaggcaagtgtaatttctgttttcttgagcaaagagtataaattgcacactaccaggtcatgggactttcttatggaggaattcctgcagaatccgcttggtggaacggaaacttcggcgaaaatacaatcattgctaattttgattcaggtacactaaacttttagttgttcttaatacaagagattttggatatggcatatctaaactgagtttgtttcttagataagtaagagtttatcaacatgtttttctataattttttctgacacattatttatttttgggccaaagaaagaatgtgatggatcggaaggtgttattccatttctattgcctttaatttatatttttccctattaacaatatatattcctttctttgtgctgaattaattaataatgttcccaattactaactgaattttttttatatatattttaagacatcaagtatatttattttttataataagaagaacatatcataaaaagctataactttttttttttaatttgaacatcttttacatcttaatcttcatacttattttgtagttttctttatttctttctttctttcttttcctcatatcaattagctcaatcttacttttttcttcctccacactacaaaagtatacacacacttttttaagatgtgaaaaaatgattttcatttaatataaagtaatttataattttaattcatcaaatttcaagaacagatatacttccatttatatactttagaaatgaaatctttaatttgttatggttggaagtgaattactgactgtttacttgttgaacaggcgtttggcccgaacacataagtttcaacgacaatggatacggtcccgtgccatcaaagtggagtgggaacggggtctgtcagattgaccattttagaccttcaaataaaacattctgtaacaggtcattttctacattttttgtctgtctctttaatctcactaaccagtgtctctaaagacatgtcaaatgaaacagatatataactttgaatcttttatcatacaaaaaaaaactttgaatctatgattaattatgtgcaattttaaatgttaataaagttagtgtaatctgagtagtttgtaagaatttataaattcaaacctctaaatctactaaataaatacataaaaattaattaaaaacatttgtaaagcaaatgaaaaagttccttagcatatgtgacagtacatgcataaagcaggcacatttgtgagtgcatcagcatgtgacagtctatatatatatatatatatatatatatatatatatatatatataaagcccaatatgcactttctatttccacggacttttgcggatctgtttttatataagcattttatatgttggtgtgttaaatacaccaagaaaaagaattatagataatacacagctatgctatatgatgatgaatcaggaagttgattggagcaagagtcttcagtgaagcttacgaggcacaatatggcaaacttgatcccttaaaacgcactgcacgtgactttgttggccacggtacacataccctgtcaactgctgctggtaattttgttcctggtgcaaccatctttggcaatggcaatggcaccgcaaagggtggatccccgagggctcgtgtcgtggcgtacaaagtgtgttggtctacaaatgatgctggtagctgccatgaagcagatattctacaagcatttgattatgctgtatacgatggtgttgatgtcatttctgcctctgtgggtggctccaatccttatattgaagctttcttcacagatggggtttccataggagcattccatgcagttactagaaatatagtcgtagttagctctgctggcaatgatggacctgcacctagaactgtcacaaatgtggcaccctggtccttcacagttgctgctagtacaatagacagggattttctcagcaacatttctcttggtaacagacatcacctaaaggtaacatgaacaacatttttcttttatatctaactagaagaatttaatataacttgtaagatacttaatataaaagtcaataaatttatcatataagataatttgtgattgaatgacaggataaataacaaatttattttttgctatatgattagtatataggggaaaccatattgtatatcaatttaatttaattgggttgcatgtatatgtatcagggagccagtcttaatagaggcttaccatcacggaaattttatccattggttcatgctgtcaatgctagacttcctaatgccacaattcaagatgcgtaggctcaaattcccctaacttgcttcaaatatttacgttattggttagatttttattacttcttgtttcttatatgagtgtgttactaccgtagtggtctttgcaagccaggagcacttgatcctagaaaaataaagggaaacatattgatctgcattagacatgataaaacaacatcagttgctcagggttacgaagctgctaatgctggagcagtgggagtgtttgtggttaatggcaagcaaagtggcggttcacttctagctgagccttattctataccaggtgcaaatgtggatgtcagtcaggataaggatattgatgaacgcgaatggtttgaaaaaggaggttccgacgataacaatagcaggtaatcatatatcacttaatggtttaatttgggattcaaaatcaattttccaacgggagaccaagcatgtacataaactgcatactccattacccagaagctccacgctatacgcaggtaaggggaagacatattgtacacagccttacccttgcaaatacaaagagactgttttcggattggaactcatgaccaacaagtcaccaagaccaagcatgtatatatttatttaaaatcaggaaagttggtatttcaaggtcattttggatgatctgacatgaattcaaacagacactaagccatttcatttcagtgttacttacattctaaaaatacctgcagcaaatgaaaaacttcatctataaatttctctgcaggaaacttgttgcttacatgactgtagcaagaacatatttaggaataaagcctgctccaattgtggctggattctcatccaggggtcccaatgcagtgcagccattgatactcaaggtctacatttcatttcatcatgatatatttttcttttccattttcttacattcaatactttattttctatttcagcctgacataattgcccctggtgtcaacatattggctgcttattcactagccgcaagtccatcaaatcaaccatcagatagacgtcgtgttcctttcaatatacaacagggaacttctatgtcttgccctcatgttgctggtgtcgttggtcttctcaaaacacttcatcctgattggagtccagcagctattaaatcagccattatgactactggtatgttggcaaaaataatacatctatatgcatataccaaaagaaacattgattacccttttaactttgtcaaaaatataattaaggctttattgtatttttagtctttcagtttttgtcgtttaaatttcaatggcatcaattgataattgctaagcatttcctcatgataaatgggataaaattcaaatcacacacttgtgacctctgaggaactaaaaatgcaaaataaaaaatctgttttagatgttgaaaaaaaaaaaaaaacattgcactttaaaatttggaaaaaaaattctgacagaaattatgctattcctgtagctaccacacaagataacaacaacctaccaattcgggacgcatttgatcagatagcaactccatttgattatggctctggacatattcagcctaaccttgcaatggaccctggacttgtttatgatatgagaacaagggattacttgaacttcgtgtgtgcccatgatcacaaccaatattttctcaaatactttcatagaagctcttacaattgtccaaagtcgtacaacatcgaaaatctcaactatccttcgatcgcagtagcaaatcgagggatgaaccctataagtgttactcgtacagttacccatgtggggactccaaatagcacatatattgcgaaagctaacgtaattgaaggatttaaggttcttgttcaaccaagttcattggctttcaggacaattggagaaaagaagagctttcgtgttattcttgaggcaaccagttggcctagtcatggttttccagtatttgggaacttgtcttggacagatggcaatcacacagtgaccagtcctattgtgatcctgtaaccttagaaatgactctctgaaatgttatcattgtcgtttgtgtctgatgttattaggtaggaagtctttaagtgcttttttattattggaatgttgtatcgaacatcgtttcattggagctgtgtttgtattaggcaccctcacaatcatgcatggagcttatatgcaaggataattctaacatggaataacttacggtcgtaaaactgatcaatgaaactttttctttctgattaaaattattcacattaatgaattgtacaatattcttaatcctaatttcttgaaattccacatcgaataaagatataaagatactttacttcatataagacttagatcgtctctagcttacaagttaatattgtgagatccagataggtcttaaacctaaattttaaaatagctatagagcatatcctaaatctgttattgggcatttgggtcacccaattatagtcttacaaagctttggcattcttcaccttacagttttgtggggttaagatcaaattctatgataattaaacccctaatttagttgtttctagctactttcatgttgtcaccttgtattatttttcaaaactataggaagtgccagtgtactactggtattgctttcagtgagagtgatttaattatctatcgttatggactttttaactcagcaaattgttatccattgtatataacagtgatccaggcatccagcggatctttgtgatgtattttgctgggccttggtttcttattttgtaacaaatctgtttaatatttactttaggattgcagaacatagtcttagtctcgatctatattattttcgtttgttgaataagtctttcaagtcagtaatttttattttattttgaaaatgtttttttttcttcctttttttgtagataaagattactggaatattggaaatttataatttttatgtttattacaagtagtaaaaatgttggctgatagtaaataaagtagaattcctacatatctaaattgtaaatgttaagttggctctcaacctttctactgaaaaacctttctactaaattgtaaaataatgagagtttcagaatttatcaaatttcatgatctttagacatttcctttgtgcggcatacactgatgcaagtttatgtagagctaaatttcttttcttttctaaatgtatgctatatacaaggatgcagttaatctgattaaccaaccttgtgacttggcctccttatgataaaccgtaacaaccttatcatcagctttcttatcaaaatatttttttaatattcttcccattgataccagaaacattatagaatcattttaatatttaaaaatagatgaatcgtgaattttatatataatatagataaaattatttttcaaaaccaaacttgtcggcctcgtcaccacgctagaaataacatcatcgtctgaaatacattaacttgagcattcctttttttttttttttcaatttgcctttttaaaagtgaataaaaaatttaaaattgataaaataaaagtaagtaaagggtgcaatcaatactctttcctttctcactttacacgttagtttttacttaaaagagctgaatgcctgagtcttagtcttccactatgtatatcctgaagaccttaattaattagtcttccactattatcttgaagtcttaactcaagaatgattacattctggataagaagaggcttttatattagcgaataagaggaggctctccaaagggaaaacttttcatttcaaactcttactataaaatggtatccaaggttttaaaaaatagtatccaatgacaatttctgctgacaatttctgctgcagtataaaatcaacgcagccacatcagttacatttatctgaaattttgcatagaaataataaagtgggtcactccatcaaaaatgggttagattgatcataatctatacaaaaaataagataggttgggctagctcactttacaaagtgggttaataatgctagcacatcctattttttttagtggattaaatatactgactcatcagattaagtttatcttgttatctttttaaatctatgaagatgaaaaaatgggttagtttactaaaaatgggttgaattgaccctaattcacaaaaaaataagatgaatcagactgattcacttggtaaagtggactagtaatattaatttatcccactttttttagtgagctaaataatctgtcccaccatattagacccaatttatcatccctaattttcctatacatcaaatattgcaatgaaactctaacgggaaatttaaaacctttattgcatacatatataacatgatgtatggattgttttaaatccttaatgttaaaaattaaaataacttatctttaataaataattttcaaaatcacttaatttgatatataattttattaaaccaagtaatttgattaaaaaaaagttggaatttacctgcccttcacccgtcatgattgaaaattgaaatatacattctatgatataaaatgttaatttattattatctcatttaataaaattattaatttttataataataactagttaaaaaagtcacatctgaattctaacccattaaccttgtaaagttctgttacatcaaaatctaactttactcgttcacatttttattcttttgttaaacatcctatgcttcatagtaggtgaagtttggaggaaattaaataacaaacgaatttttttatgctttacggttcaattttaagtgagagtttgagataataatcacatgtttcacccgcaggttttattatcatttgaggatgttttatttgatttattattattttgagatcaattttaaataattttctaaaagaaaatatattataaaaggtcgtaactaatgttattatttataatttttatgtatttttttaattaaagttgtaaaagagttgaagacttcagtttaatttttttaaaaaaattacaactttaaaatcgtaatattttttattttttaaactaaatttgtaatattttttatacttcaattaaggttttttaaaaaaaaaattatgactttgaagtcgaatgatttattttttgttttatgactttaaagtagatgattgcctttttttaaaagttataattttatttatgacttctattttatatttttaatatttttaaaaaattgtaaatattttaatttaattatttaaaaatgaaagtatttttaatatattttatattttttgaaatttatttaatatattattttatttaatatattttctatatgtttctacaattatttattaattaattaaataaaaaattattttactattttacaaaaaattgaaaaaacaataaatttgttaaattggaaccgttctaaaaaaactaaaaattcaaaataattttattttaaataattaaattaaaaaaatatttacaatttttaaaaaagtataaacaaaaaatatgaaatgctaaatttaaaaaaaatgtaaaaatataaaatagacgtagtaaataaatttacgatttctgaaaaaaaaaagtaatagaacttcaaattcataactcttaaaaaaatacttaactaaaatcataaaaaaatttatattttcaatttaaaaagtaaaaaaaaaagttacgattttaaagtcattttttttttaaattaaattgaagtcgttaatttttttataatttcaaaaaataaaaaaattatatgtcgtaacattgattacaacttctaactcaaaaattatagcatatattatcatttatgtccttttaaaaaattattttaaattgatcttaaatgataataaaaaaaatgcccctaaataataataaaaccctcacccgcgagaactcgagttttctcaagtgttcagaacttgcattacaaggtttagggacatgtttcagtgcaactaaataattaagagtgacatcgttacctattttatagtagaaaaatctgtcagaaaattgaatcaacattgtaagtgtttttttattccttataattaaagactaatattttaagatttacaacaattttactcaaataaatgagctagagccatagtaaattataattattgttatcagttatggtggtgttatcatttattaccacatggttgatgttattatttaccactaaataattaggaaattatacccatgtattttttcaatttaataaatattatacatgaagtaaatttagaactaatatcattaattaagattcaaatatgtatttgaataatatttatatattaatataatgtttataatttaaaatatcattttcctaaacccatacttgttttaataagttttattgtaaccggtttgtctaaaaatatgggtacccacgttggcaaaaatttaaaaaaaatacaatttaattatttaattagcaaaagggggcagttgaaaaaatatttagcaaaatggggtggtcaaacacgcccagctggggcgtgtttaaacacgcccagatggggcgtgtttcaccagatggcgccacgtggcaggctgaaacagtgttctagggttttcgcggtgttttcgtaaattacggaaggtcgtaacttttgactgggacgtccgattgacgcgaaaccggtggccacgcgctcgaaattgagaggagaaggcctgggcaagttcccgaagggtttatgtttagggtttcagattttggattttgggtataaaatttagggtttgggatctagggtttagggtttagggtttcagatttaggttgatgggtttcagattaggttaggggtttatgttatgattagggtttcagattttggattttgggtatcgaatttagggtttaggatctaggatttagggtttagggtttcagacctagggtttagggtttagggtttcagacctagggtttagggtttaggtccgatgttgtgattagggtttaggtcatcggttacagacttaggggacttaggttgtatggattccggtctagggtttaggtctaatgttttgattagtgtatagagcttgggttacagacctaaggtttatagattctggtttagggttaggtttgatgttgtgattggggtttagttcttcggttacacacttaggggttatggatctcggtttaggatttatgccagtgaataacctaatgagtgttacatacacttcactaatattgagtaattagttttccaattcaagttttgccttggcaagcacttccttaactgcaattttctttgattttatctcttcactttgcttctgttttctcagctctttccttgagggtggggttttgggtttacgatttagggtgtagggtttattgtttaggatttagggtttaggatttaggatttaataaactctaaatcctaaacaataaaccctaaaccctaaaccctaaaccctaaaccatacaccctaaatagtcaaccctaaaccctaaaccctagatcctaaaccctaaatctgaaaccctaaaccataaaccctagatcctaaaccctaaattcgatacccaaaatccaaaatctgaaaccctaatcacaacgtaaacccctaacctaaactgaaatccatcaacctaaatctgaaaccctaaaccataaaccctagatcctaaaccctaaattcgatacccaaaatccaaaatctgaaatcctaatcacaacgtaaacccctaacctaatctgaaacccatcaacctaaatctgaaaccctaaaccctagaccctaaaccctaaaccctaaaccctaaaccctaaaccctaaaccatacaccctaaatagtcaaccctaaaccctaaaccctagatcctaaaccctaaatctgaaaccctaaaccataaaccctagatcctaaaccctaaattcgatacccaaaatccaaaatctgaaaccctaatcacaacgtaaacccctaacctaaactgaaatccatcaacctaaatctgaaaccctaaaccataaaccctagatcctaaaccctaaattcgatacccaaaatccaaaatctgaaaccctaatcacaacgtaaacccctaacctaaactgaaatccatcaacctaaatctgaaaccctaaaccataaaccctagatcctaaaccctaaattcgatagccaaaatccaaaatctgaaaccctaatcacaacgtaaacccctaacctaatctgaaacccatcaacctaaatctgaaaccctaaaccctaaaccctagatcccaaaccctaaattcgatacccaaaatccaaaatctgaaaccctaaaacataaacccttcgggaacttgcccaggccttctcctctcaatttcgagcgcgtggccaccggtttcgcgccaatcggacgtcccagtcaaaagttacgaccttccgtaatttacgaaaacagcgcgaaaaccctaggacactgtttcaccctgccacgtggcgccatctggtgaaacacgccccatctgggcgtgtttaaacacgccccagctgggcgtgtttgaccaccccattttgctaaatattttttcaactgtccccttttgctaattaaataattaaattgtattttttttaaatttttgcccccatatttttgtccacctcgacaaacatttcgtgacattgcccgctatctaacttctatttgtttatatgttattcaagttggtcaagtgtttgaaaagcatatcttccaaaacaaatatgattccctcaatcatgtaagtattaatatatggtttgattgttaagctaaattgaatagacatattaatcaatgaagttaaatataaatttatggcttacatatctctttagttccggtatatattgcttttattgttttagtcgttaaaaaaattgttttctaaaaaagatttctatggaatttctttttattggttttgttccttgttattttgctttagttctcgtaatatatatatatatatatatatatatatatattagtttctataattttttttttcattttgaattattctctttgaaagttatttgatagagactaaaaacaaataatctatatattacaagaactataacaaaactataaggacaaaaacaaaaaagaaaaagaattttacaagggtcattttaaaaacaaatcataagaaccaaaatatttaaacaaaaaaagcagtatgttagaagaatcaaaaacatttttttgtctaaatttatttatttataatttacctacatttctataacatttatttcctgtaatataattttattatgtttaattaccatttagtccctgcaacaatatttccttttattaacccttgtagtttaaatttgggtcctatagtcattttttatacttttggtcattgtcgtctaaaattataacttaatgttgtttgaaatgaacatgaattaaatgagtcttggttgtcatgtttatttcaaatgaccgatcaaaatttgtaattataaaggcaaaaatgcatgggatattttaaattatagagactaaaagaaaaaattattgtaattataaaaacatattagtaattaaatcatgttcttatttagaatttctcataaattacatttaaatttataattaagttacaattattaattaatgtatatattaagttttattattattattttaaaatataatgattatgttgaacattactgaatcattttactctgtcaagaaatagtgaatcattttactgatgtgcatcatcaacttaatttatatataatgtagatatatttattttcaaaattcaaattgtcagacgggtcactttactagtttagtagaaataagaacatcatcgtgtgaatcgtattaacttgggcattcctttttttttttttttttgttttttccttttttaaagtgaataaaaatttaaattataaaataaaaagtgaaagtaaagggtacatgataggcactcttcctcactttacacctttatatgtatattttataagacctgaatccttccccgtgtgacatcactatgtatctcgaagaattttggaaatagtgtgtacattatttgtaataagaggttctttataaattgagagggaggctctccaaacatcaaactttgtcagacaaagctctataatgattaatgaagtcgtctattaaaaaaaaaagaaaaaaaaaggagtctgtcacaattcccataatgcaaatccataagtttatatttcaatacgtttatcttatttgtttgtttgaagaaaaatagagtgggataaaatagaaaagagagagggaaaatagaaatactaaattaatattatttatttaagtggaaaaataaaaaggagagaagtacgtgaacttaaagcaaagaagcctgtgttgaaataatgcatttgattaggcagttaaggtctttgattttgtcccttcctttttgtatcatgccgttttggctgaaagttgtaataccgtgttttcttgcggattttagtgttcttggggttttctcctgttttttcacacaaaaaatatattgcatctgatttagcctattttaatttgttttggggaattatttaacttaaaaaaatagagacaattgctttagaaaaaaaaagcctaatcagaccactttgctttgaaaataaataataaaatgaaattatatatagaataaacaagaatgaagcctcatatagtattgaacaaaattaatatcaagataaatatataagggaagataattttcactttataaatcaacagtatatgatttagttattacacttaaactcacattttagaataatatgagaatctattttaaagtcacatatcatgttattcatgcactaaatctaaaaatattttaagaagacgtataaacctaaatattatttcttgtgcaattaatatatttgttattgttgagaaaaaagtatcagatttattagaatgatacaaaatataaaatatataaatgaagaaaaattttatttcataagttggtttggtaagatttagttaaatcaaaactcacattagtgtaaaaatgtgcatcactcatgtttaagctaaagaaatttacaaatggagttatgttttccttagattgattggttgtacaagacacaaaaactcataaattgatttatcaaaagacgacttccttctttcttttggtggacccaaaggaacgacttcctttcttttcttttctgttttttggagaggaatgacttccttttgtaacaaccccgagatggcgacatgacatgtatactagggtagggataagatttttttcacataagataataaaaataatcactccaatatcataatatttattagaaatctattttactaaaatatttttattgtctttcttatttttacaaacatattaatcttaaatatgtttttaatctcttaaatatattagtttcttatattttataataatgaataaagcttttaattttgaaccaatcaaactacttaatttaatttaattaatttctcattttatgaaattttcatataacatttatttattaaaattcataatagaacattatttataaaaataaatattttaatcaattgacatttgatttaataaaatgtttaattaattaaactttgttgcagataaataatcttaatttttttatttgaaaaaaaaaatgatccgcataatagttttgtgtaaaatatataacatttgtaatcaaatttattcttcaagatatccttatacgagttttcttgtagattactaaagtcctaatatatattgggacttgggagtgtcttcaattaaatgcaatacacttcatcaagttgctaaccgttaaggtcagataattctcacagaaatatacagtcaaaatatccttatcttaccaaaaacattacttttttcttttgataaagtagcttttttatttatttttatgtaaagtgactttatttattttataaagaccaaaaacatgaccgtctcccttcaaaatcacactttatttattcgatcttacaaaagatataagacaactttccattattttctgtctttacagaacagaagaaacatacaaagcactccatcagaaacatacaaaacatcctcgagaaaaacattaatatcaggaaaagcttaattacagtgtacaccaaaaaactaaaaaacatacaacacaccagaaaacaagttttaattatttagatagttgaccaagtgtgatcatggggagtggatccaaagaagatgattttggcatcacaaactcgttatgcacttgttccatagttgggcgaaagcgtggattctcacttaagcaagcaaatgttaattttgcaatcaagatcacttcttcaacaattggcttcactggctgaggtagtcgctggtccaacacatgaattaatagcatattagacgcagatgatgaaaacaatgaagaaatgagatctcctggatgcattcccattattatttccaaacaaagcactccgaaactgaagacatcacatttctcattcacttccatagtataagcaagctctgtaattcatcaaaataataacaaaatagtattataaaacaagtagcaggacttattattgaaacaagtatatataggattaaattcttaagaacaaaaatggcctaacctggtgcagaatatccatatgtgcctgcaaacgctgttatattttgtgaatcaggattcagaattttagctgttccgaagtcagagattcgggcttcataatccaaatctataagaacattcttgcttgatatgtcacgatgaacaataggaggaaagcaaccatgatgcatatggtacaaagcacttgccacacctttaacaaccttcaccctcctttcccaatcaaacattgttgcacgcgtatcatcggttagtactttatccaagctaccaccctctatgaactcataaaccaaaaaggagaagcgtgcatgtaaacaatatccaagtgacttcacaatgttacggtgcttgatttcggccaaggctttaacctcagctgaaaaagctttcgaatcgggtgtttcctggttgggtgcagcatgaagttttttcacagcaacaatctgtcccgagggtaattttgccttatagacagatgcagtacccccttctccaatgagatatttatcatcaaacccctctgtggcttccatgatatcttcatacactatttttccatcataactccaaagggaataatgattctcacttttttcttctttatcctcctcctttttggcctttgttgctcttcggtagcaaatacataacgaaattccaaccaccaataataacagaaatagagcgccgaaagaaaggagtaatgccaacatgatgacatttcttttcattttaccatgaggtagggtgtggcaaggcaccaaaccggaggcatttccacacaagcctttattatttttcaatgcatcaaatgaagcattaagaaaggctggaatgttaggaattgaaccctccaattggttgttagatatgtcaacatttgccaagctattcttaaaatcaggaatggctccagagagattgttgtgcgagaggtttagcttttccaatctttgcatactcgcaagtgctgctggtatttctccatttagcaaattccaactaagatcaagatcttgaagagattgcaattcgttaaattcccaaggaatgctttctgtgaatttgttgttgctcaagttcaagcgaagtaatttaagtaaagatcccacctgttttggaattgggccacctaaattatttgctgcaagctccaatttttcaaggcgggacaaagaacctatttctgtaggaatgttacccaaaagttcattgtcgcctattgatagctccaacaaagaggtcaattttccaagttcttttggaatttttcctgttagatgatttgaagacaagaaaagtctctgtaacttgggcgcctggccaagttctaggggtataccaccagataaattgttgttggacatcataaggcttgtgagattaggacactttgcccagtttggtgaaatgtggccatgaaaattattgctactcagattaacgtagtccaactctggatatacaccaaaaacatctgatatatttccggtcatctggtttccatctagtctgagtctagaaagactggagcaatttttcaggctttttggaactggacccgtgaaataattagagttaacagaaaagtctttaagtgaaccaccaaggcaaatttgttgcggcaaagggccagtgaaattgttattagatagttgtaagcttatgaaattggtggagttattcattgcgggtggtaatctaccattaagtttgtttttatgaactagtaaataggtgagctttgtcaaatttccaaaggtggaaggaataactccggaaatattgttttcagaaaggtctaagatcattagattgacaaagtttccaatggaggtaggaattgatccagaaatcatgttatcgccaatggacatattgactagcttcgtcaagtttccaatactggaaggaattaatcctgaaattttattttgatcgatttcaaaaacaatcaaattgaccaagtctcctatggaggatggaatggagccagaaagactattgtttgagagctgaaggcgttctaaatttgtcaagtttgtaattgaagtggggattgcaccagagataaagttacttgacaattcaagtctaacaaggttggacaaccttccaattgttgggggaatggtaccagaaagtcgattcccttgaattattatacgcttcaagttctgcaaatctccaatctcctcaggaatagaaccagaaaggttattgcgttccaagtttagaattgacaagctagtcaacttcatcatgaaaatggggattgagccactaacattattagcattcattatcaattgagaaagtctggacaagttagcaatttgctgaggaatagttccagtaaaactgttgtgactaatatccagagttagcagcttgggaaaggaagagaagttgagagtgtgaagagtaccttttagcccaagatttgtaacatttatgatggtcacagcgttggattcgttacaaacgattcctttccacctgcaaggactgacagcacttgtccatgaagacagtgaagcttggctttggttgtcaaggctagctttccactcaagtagagcatttgcttccgtcccttcataagcagtgatggcagcaaagccaaaagatgaaaacgtgaaaacttgggaggaatggaggtttaggagtgaatagaaaatcagtcgaattaatgaaagcttagtgaaaaccatgtttgagctactgggtgattatgggaacgtacaagatgttggacgctcaaagctaccacgttccttcctatatataacgtaagactcaaaattttatgatttttaataaattttaaattctaccaaacaacgttataatttaaattgtttctaaagacatgtcaaaatgtcattacacatttaacaatagatccgtaaaatgagcaaaattgaaaattattgttatgataaaatctgcggaaaatattcaaattgtaaattcatgaaataattataatttagtgttacagtgtacaattaaatatatgcaaaataatcaagagtattttagtaaaaaataattaatataaaaaacaatgtaaaagagatcttatcgaaaaagaaattctcaaaaaattataggatggatgtagtagttataatgaaatagcagaaatgctggtcatggtcaatatgtgaaagactgaaagaacgcgtacaaacaaattgaacaaaagcgcaattacggacttacgtacggtcgataattttttgagtgtttattaaattatgcttaaaactagttcaatatttttattttattaaaaaaagtgaaattttgaatttttaaaaataggaatagagatagaaaaaaccatttaaatgaaaaatgtttcaaatatatttttaattcctataacatatttatttccttataaaattattttttaaaatgtttcttgtagaaaaaattagttttattattttttattttattttaattcttataatatatttattttcttttatttttctttgtaatatatagattatttgcttttagttcttattaaattagtatagtctaacatcctctcaacaaccactctattaaagcaaagtattgtacacgttgtgaaaactggcccggtcattaacccgatcgagatagtggattactgggtcagtggttcaaccggtggatcaataattggtcagatttggtccgatctatattaaaaaattcaaaattatattatatatacgtatataactagtattatttgataaaaaaaattcatccatacttctataatgaaaaatccaaaataacaattgaagtattaaagttgataacacaagtaaagtatattaaaaataaaaaagactgtaaataacaactacctaaataaaaacacaaaaactcatttcaaaaagttataaggaaactgcataaagcaaaaaaatggataaataaagcaaattaggtccaaagaaaccccgctagataaggaatttaaaaacctatccactatatatactttcttttcttctctgttgaatgttggttgcggctgctgcactttccattgaagaccatttcttcttctttggctgaattttttgtactaaccgcatctattgaagaagaaagcgttgattaaaaaaatgcattgttgttgagcattgattaaaaaaaatatattttcctctcggtcgaactcactcttttatttccagcgcacacttctctttcactgtcacagctaatggcggatgaagaagttgtggcacccgctgccagccccgttccctctgaaaacaaaacaagctcgaagatctgcaaaccgaaaacaccaaatctaatgccaactccatctccaaagccgtgaacgccgatgaagccatcatttccgtcgagacagagaacaagcgtctccgtctcgacgacgccgttttgtgcgtctaagcttttttttttcttcaccaactcgtccgggtcctaaaaaccgatcgaatttccgattcttctcaaaaccgtctgattttcttcggaccaaactgggtcacatgcatgaccggttcattagtcaactcgatccgattgatgctccaatttccgattcaaccaattcaaccggccggttcaaatcaatttttacaactatgattgtacactctctacaaccactccattaaaattaagaaatttagtttatcttatcttaatactatattaacactatcaaataattccatattaagctcccttaattaagagttaaggcctatatatatatatataaaattaaattctcaaagtaacatattattttatccagtcacttagtacattcattattctctctatgttgagacttaagttgagtatgggagtattttttttagatgtatctcaccttcggaggatagttttgccatgtaataagaaattacagcccgaaaagaatgatacaacgagaaggaaaggacacaacaagaagagaaagtattcggtcatctttaaacaggaacaactttagattttgagtctaagatgttcaatgcttacctccctatggccatctcaatttgagcagacacaaaaggaacataggctatctccctaacgtttagtttctgtttaaattaaacaagcataaattacaagaactttcccaaagtttggacttattacacgacatccttatgttttttaacgatactttcagccccatcctttaaacagcatgaagaatccagatctgccccgactttcagttgccgccgcggaggatgatagcgtgattgaaggaggagtggtcaccgctgcgccgctgtcagagtttcgcaggccgcgccacgggaatccagatctggttctcactccttcatatataaccgggttcttgaagtttttcacagggtttcttttaattcttcaatgggttcttgaagttttttaaattttattgttcttcaatagttccgttattggcttgttgttgctatttggttgtaatctgttattggcttatctgtggagtgcgagatatataaaagaatctaatacattgagaaactactgtgacgttagttttgtttgttcttgtaagttcacagaagaaatttccagttttgaagggtattaaacttgccattgtaagcggattgggaagcagatgtgtgtgtaaaaaaattattcatgtttttcattgcctatcttagtttgtttttgaaatttatcttctaaatttttcgtttatagttaagtgaactccagatcaaataaatggtttaagaaggaaatggtcatttttggacagtgcttcaatttcatgtgctggaaatcagtagcaaatgacggacattcttgaaacataatatcattaaaaacccgtgtcagtcaagtgtgcgcttctgttaacagagttaagtaagtttgagggtgaggggtagctgctattatgacttatgagagccattaaatatttaaattagcggaatttctagggtgaaaaaatgaaggaatagttaagggaagtatgtgtaatttacaaagaatttttcctttcatacgtagactaccaaattcataaaaatgaatggcaaggatcaataatttgtttaacatattattaataaagttaaattgtaattttagtccctcttaattttctaaattcatgattttagtttttcctaatttttaattataacatttgatctcctagttttataaattgatgattatggtttcaatgattgattattaactaataattataattaatagagttattaagttaattataagttaaataaaaactattaatcattaaaaaaaccttcataaaagattatttaaatgtgttgctacttgaagtcatgtacaacaatggatgtgaaagagatgtttgtataaaagaggagtgcaatgttgtaaaggattaggattaataattcttttattaatgtttttaataattaatggtttttaattaatttcataactttattaatcacaattgattattaataatctaacaaggaactaaaattaccaatttataaaattagatgaccaaatactataattaaaaaggtaaaaccaacataaattaaaaaacttgaagaataaaattacaacttaacctattaattaaatttacaaaattatagccaccaatgacttggatttttggatcaagtcaatctccaaaagtcaagtaagtatcatcatgactccgtgtttgatttatgagaaaccaaggaaaagaacaagttgcgtagttaaataatgaaagtttcatctgtttttcaaaaggaaaaggaaacaatataatcttaaatatgccaaattacaaacaggcacaacaatcttacctattaatcaccgcatcccacagttctaattacctctctaggacctatgatattgtaacgcccgaccacaaacttctcaggaggtcacccatcccaagattgctccaagtcaagcacgcttaactgtggagttcttatgttatgggctaccaaaaagtacactactacaaaaaaggccttttacatcggttatttatccatttctacgtcggttgaacaaccgtcgtagaaagagatgtcgttaataaatcaaaattttaaagtcggttgacaaccgtcttagaaaacgactttctaagacggttgttaaccaccaacgatcttagaatgtcattttctaagacggttgttagctacaaccgtcttcgaatgtcactttctaagacggtttttagttagcaaccgtcttagaaatctatattctaagacggttgttctctaaaaaccgtcttagaatgcagctttctaagacggtgcttacagaaaaaccgtcttagaaaagaacattctaagacggttggtggttaacaaccgtcttagaaggcacctttctaagatggtttttacatcacaaccgtcttagaatgttcatttctaagacagttgttatgtaggaaccgtcttagaaatgaacattctaagacgattgtgatggcaaaaccgtcttcgaatgtgcttttctaagacggttcttttgacaaccgacgtagtttcgtgtattttttttaaatatttttttaacgcgtacataatagtagctgcgatgattttgcaaaactattactggaccatacgaagtatataaaaataaatatcatttcattaataagaataaacacaaagtttcactaacaacaatatatataagataagatataacatctataacaatacacacctcttttcctttgtaaattctaatattctgacacaaagatatatcaattgcacacgacatacaagaccaccacaggtttcaaaaatgtcaaatgaacaccaaaagccagctattaagcccattccattcttattaccttctgcacaacttctccaccctgtggaaaataaaagccttggagtagtgttagcattaagagtgagttgtcaaataagatcagttctacatggaaattggcacaccagaaagttgtaacatatgcgttcttaagctacaatccttgacctgccagaattattagataaaaaatagcaataagaatattgatacagcatattagtatgagatagcttcaagcaaacatgattacctgcatggctgctaacgaggacaaaaactccttgcaatgttcaatgtatttagtgttgaagtgatccacttaaacagcaaaaaagataatggattctggacattgagattatggagattatattttgcaatacttgaattcaaaactattgaagaaataaacaaggaaataagttcccacgccttaatccaaactgcttgtcaacatataaattctcaatttcacaaattcacaatcattaactttcaaattaaaaagaaaaattgttgcaatctcaaaagttataaaagcataataacagcaaaatttataataccaaccacaaaaaggaaaacatagcaaagggaaaagaggatgatatttttaattgtgcaattggatatcagatattataataagcataaattaaatggctatttttatatatttagcaaaataaactaattgtgtacatcagaaattagctagccattatatgggtcaattatgaatataatgtcacatttaagaggacagaatataaatccaccaggagaagttacattaattaaaataacaataaaataaaaaagattactcactgtgagaggccaccctttcaaagtcaaattattgctaccttgatttgatcctgtcacaagaatagtaattaaacatcataaagaaaataacactaaatcccaaaatattgtcaaccaaccatgaataaattgcaaaggaaaaaaattccatcaacttgcagcaaaacagtttcaaaataataaaacatccatagactgtaactactaggattgttatggtcaaacaataaagagaacccagcttattaagctcactagaacatgtcaggtagctaaagaactgaaatggatgacaaagcaaggaccatacatacaaatgtacatttcaaatttgaaaagtcaaatgacagttgcttctttgcaaaaaataaaataacatgccctcctaaattctcataatagagtcttattctacagcttcatgtacagccaacatcatagattatttgacatcaaaatggtcaagaaaatggcattaagtgagacagaaaataattgaagaaacataaaaatttatgaacatttaattttaaaaaatcataaattttattagaattttataaattcagtttggacagcttattaagattttaaattttctattagtaatatattattatttgtgaatctcatttagatttgatttaaatttcttaattttattattacctaaatatttatgaatcatgtataagtaatattgaatttactaatcaaataaagattgaaataaagaatttttttaagattttttttaattaagctaaattctttttatataagaaacctaatttaataaagattattttatataagaaacctaatttaaggtagaaaacaaacaaaactaaaagaaaaaataattaattattttatatacaccataacctgttgctctctcattttcgatatccataataaagcaatatatgtgcctattttcaattcataatatactaaatatagtgtatgatcatggatgtatacgtgattggcttgcatttttaggactatcgaatagaataatatagaagtattataaataccttgttgctgatggtaagtgtttctaaaattgattttagaccaaatgccaatgaggatttatgaatattgctcacttgatctggtgtgacttaagattgaaaattaagaaaaatattaggatttaagttaactaagaaaaaaccacatttcccacaaaaaggtccacaacaatcaaccgatactcaacaaagtccaaaaatatagaaacttataattcagaaattaaaagttttacaaaatctaacacttaataaccaaaatctataaataattttataattttaaaaaattcagggggtgggggtaagccaagaatgtcccttaggcaaacaaatggctccatccttgcatgtgctaattgaaagtttttccttaattactcttattgtatatttactttcttcatatcattaatgtagtacacagatacttatagcttaaaaattaaaatagttgcttaacagccaatcctgaaataaacttggcaacgtgaaagtgcatgagcaatcaagtaaatgcaagttttcatatactcacatggctaacatgtaaagcaccaagttgtaagcagcccctgcccaagttgtttctgtcacaaacccctgtaatcaatataataagagcatttttaataagaaagtcaaaacaccatggttttgatcaagacaaaggaaatgtatagtgaattaaactgctttgcacaatgttaactagtgtagtcctagatttcagccattaaactgtttttcacaaattgtttatatttccaacctgcttgttggtagacttatggaactttctttagatctattaatgaactctggttttagagttaactcaacaagcttgtctgcctttgcaacatcaagaaccaatgcttacactatagagctactgtccaaaatagttccagccactaaggaatcatatcacaatgagaattggtacttggagaggctcctagtcctttcatctccctaaccacaatactggatagaaatgaaaactaataaataaggtgcagagtcaagaatatccagacagtacaaactacttataagaacaatatgaggaccaccacaaaatattgttgaaggtcagaaagaaattagaactttaaaattaccaagcctagggaagtgactcatgcaaaataaaactgttgacatttatactaaaaggagtgttagtaatcactattatacacttttttcaatatattctattattgattaaaatttattgaaaattttaaaatcaaaagagatatttattaaaaatgaaagtaaaactctctagaatttgtaatttcaagtaatagtagaaagtgtgttgaaagaacatactagcaaatatgttcctacttgtcaacatttatctttgtaataattactttaaaaattatacctagagtgatttgctaattacttttaaaatacctagatggcttttaattaattaacaatgtaagttttattttgatagtgaatgaaaattaacctcataaaaaattgtaaaagctaaagatgcataagcctataaatgtgaaggaaaagtttttttttttcacttgattcatcaacagggtaagcaatatattacttatgtatggtagttaattaactaaaaaataacagtgattaataaaaagagtaccgcttctgatttaataaaaaaataaaagtactataataattagtacaaaaaaaatgtactttaattagtaatattatttggagacttaaagtttgaaaaatacatcaattttctgatgattaaacaatatacacttctaagtttgaaataagattaattttacttgtcataacacattccctttatccaacagagttgccttttaaaattgcactgcctacaacgtatcagtgcaaatttctagtcccaaaatctgcaaatgcatagaaaataaacaagagactttaaaacaaaatattaagatattttttttggataagacaaataatattattgatataacaaaagatagatatactcaatgggtaccagaagtaccaacaagcttctcaaaatgattacatcagttaccaaaagagaatggtggctctcgagacatcatttttcacataactaattaacacccaccatattaaccaagcaaaagcataaattggtttaaaaacttcccctgtgtactgctatcttccagcttcccttatcccacctccagcaacgatgtttcattcatcccttcacgttcagaacatattttctcgcaagcagcaccgaggattgttggaccacgccatcaaagtgcagatctagaacatattcctgcactttgccgagagccaaaacaaataaacaaaacaaccaacaaatgatgatggccaaactgattaacagcgttatgttcggttcacctcaaagtggtaggcaaatgctttgtggcatatgagatatgaacaaataaaaggctatcctttttcatccattacaaccaacatggcaaaggatccacaacctgtaataactcttctctccacaacctcaccatattcatcttgtattctttgtctaagagtctaaaacataagacattgatgagaagatagacataaacttgggaaaacaacttctggttttaggacttaaaaactaaacatacctggaattctctcatgagatccttgaattttttagtcaaggcactgtggtttcaaggaataatctatattaagctttctggatcattttttcaagtacaataataaagatatgtattaccaacttactttgtcatattcattcttgctctgtcaacacctgttcccttctcacaaccagtttaatacatcgtcagcacctataccagaaaatgttgcaaccaaattctaaacagatgacttaaattaaaacataacatacccttgtaacacacctttcattgaagatgcttttgtgacagctttggattcctcattagcaaggggaagagagaaatcaagagggtagtcaccctgaaacacgccatttgatgtggctttcattggcggtgggcaagcatttttagatgtggcattggaagccatttcaacagtccaaaatatgtttagggccagttccagaaccagacaatgacctctcacaatttattattggttagtagtataaaataattctaccgagagtgtgtgatcgttacacttttttttacttaatgttattctaataaaaatattaacctcattcttaaaattaaagaaattacaaaattcagaatttaacagtttttttttactgaatgttattctaacagttttttattacaaaatacctgaactaagcttttgtcaaagcaattattcgaaaatcactggttttgaagccaaaatatgaaagtaccttttgcctcttgaataccaccaaatgcagaaaatatatcaaaacctccagaaaatactaatgcttagaaagtgttccttcaaacattatgaaaatacttaagactgtatcaaaaatagatgtcaataaatacacacctagtccaacctggtttctgtgccaaatattttctaaacctgcagagtagccagttcaccactttgaattgagcccatactccaagagctggcaaaatttaatacagggaaacagtcatctgcaacccttagccaacacttgagattcatgtcaaataggaaagcatgacgagtgacaaaaaacaaaaggacaaaattccgatacttccacctgtgcctctgcctcctgaatctccttttgccatctttcaaactcatcaacatcaggagcagacactacataaaattcctatgaaaatattttatgatttgttaatttaaaattattgaatggtttagattcaaaaatattaaaggttaggattagttttctgataatttaatagcagtaacagaaagatatattaatttaatacatgaagtctaaggattaattgagaccaaaataaagtttaggatgtctatttgtaaaagtatcaaatttagaatacttctattttttttgccttatcatttactttaccagggccccatgggataatttaagaggacagaaaatgctatttccctgtcttgccgagtgttttggagcaagagttacaatcatattcatttaaaacatgtaaaaataccaaatttttatttttttgttcaaatttttctaccaaactctacagtagctacattgcaaatcatcagctaccggcaagttgactccaattttcaacttgaagttgaacataaagaacaagtgctgtgtccagtagactagaaaggtaacagtcaaaattattgcccatctataccactatatcaaatggattgctgaagtgaaaataaagatgaaaatcgtacgttcccctggaatagtgatccgtcatataacctttctgaacaaagattgtatactttgtattttccctgcacatcaaggtttcaagagaacaaaattgtcagaagatcatagataaatagtcaacaacactcggtatatcaagatactaggagaaattaattgttgtagcaaaccatttagtgaaacaagaaaaatggatagtaattgctcaaatttatagaggaagttggagcctgggagaatttcaagatcttcaggtactcaaagtacatctagcagaagagttcaatatcactgtcaattataattaaatgttgggttgctgtttgggctactgtagatgagtgttgtatatgataccattaatccaagtgttgtagcagtgttattttatatttttggcatagttacacttttggtccctattcttcagcctataagcgattctagtcctcctaattttaatagctcacatttagccctgttagttttgtaatagttcaaagtaagtccctcaccttgaaatgttatccaataaataatagaaatgtaatagagatatggcatatccataattcgtataattgaagtggtgaaattaaatatacctagagaccatagcagctatagcaccagtccagagatgtttggtggtgttgacgacattgcatcctcgtaccctaacctttctctgctgaacgacaccgtttgaggttatctccgttggcggcgaggattggatttggaaaagggagtgccgtgaatcttgaacaaaatgaatcgaacgaaggaattgggtattttggggtcgagaaacaatccttcggtgaaggaaccaaaatcaggaatcggattgaagaaaatgggaggggagtgttcattttggtgctgacagagttcacctgcttgcattgccgttctcagacgcccgacgctcacttcaactttcaacacggaggtcacgacgtggttatagctagggtgagtgggtgcgcttgccggagacagctagggtgatggacaatgggagagggagaggaccttaagggatgaaagtaagttttagggcacgaaaatgattgggctgaaatttttaaaagcaaaaatggagacaattttcgaagacggtgataggcaaaatgtctttgaatagacaaaaattaagacggttaaatcaaaaccgtcgtagttttgaacatacatagatggttgtacaaagaccgactttgaaatattcattttaattacaaaaatgccaccgcaccgcaaacaatatcggtttcgcgacaaccgacttcgaatctctgtcgttaaatgtactatttgtagtagtggtagatgtaccttgttggtataggtagtacctattaaatcctttaagttattctcaactgtacagtcccatacctgcacagcctctggatccctctcggtattcgattcattcatgtacccctccagctggaagcctgccaggagccgctccttgtccgtgcctcactgcaccgacgatcactccccgccctcgtcagcgcccgggatgttacagatatcactgattttttggagttttagtctcacataaccgtatctatattcttttttttaaccccctctcttttcttcattatacaactatacttttaaactgcatattattgaaggccgtggcaagcgtgggggaccttctcaaggcccccacggtgggaaagaaagatgatccgtaagattgggactttttttcgagatgattttagttccacagtaaaatagtttacaccggatcaaatttattttttttctaaactgcatattattgattgtgccttttattttttgtgacaaagcacttcaatgcaacatgagcagaaaacacgcttatattacagcctaaaaaccaacaaaaggcaaacaaactaaaatgacaatgataacataacaatgctgagagtaatttctaagtgtccagcactacgattggactagttactctgtgcttgccatctgtccaagacaaattcccaaataaaggaatgttgtgaccaggcacaccaattgcctgaagaataacctgaaacttctttttttctccagttttcttaaaggtcaacgaacttggttgcacaagaaccttaatccccttcggccactgagtattcacaacatacgtgcttggaggcccaacatttgtaactgtacgagtaacattaatagtctttgagccaggatgatgcaccgtaattgaaggatagttgaaatcttcaattctgtaagacttgggacaactgtaaggggatttcaaattgagaaaaaacttgagtaaagcttggttgtaaccagaagcacataggaagttcaagtaatcggttgtgcttaaatcataaacaagtccagggtgaattgcaaggttaggctgaatgtgtccggcgccgtattcgaagggagttgctttcttatcaaatgcattccgaatcggtcggttggtgttatctagtgttgtagctgaaataaataaaaagcatagttgttaataagccgccaatgatttggtgtgcatgaagattttatattgatattactttggtaatgaacgtacctgtagtcataatagcagatttgatagctgctggactccagttagggtgatatgttttgagaagacccgcaatgccagcaacatgaggacaagacatagaagttccctgttgcacggtgaaaagaacccgacgtctatctgttgcaagattagtcggacccgcggcttgtgaaaaagcagcaattatgctcacaccaggacctgttatgtcaggctaaaaaaagaaacaagttatggttagccacaaattcatctctgacgaatcattaattgtaagaattaaaagttaatgacctagtcatgtaggtgtagttaacaaaatgtatatattatagacctttaggatcaatggttgcacggaactgggacccctggatgagaatccagctattattggagctggctttactcctatatgtgtttctgcagcactcaagtaagctaaaatctccctgcaacaacatatatataaattaatattcaagtgcttcacttgctttgctgcaagtatatgtatatatatacgacatttaaaagggattagtatgtatataaactttacttgttactgccgcctttaggattgccattcttttttaaataatgttcggtttcttttccaccgacacttgcagctggtaaaatatgatcctcggccagaagtaaatttccacttcccttatcatttagcacaaaaactgacacagcgccagcaagatgaccctgttggacctctttagctgaagttaatttattgcctcgaaggcagattagtatctttccccttacttttctaggatcaagtgttcccgctttgcaaagacggctacaccaacatacatacatatatatacacacgaaacgtataagacaagtatatataaatatttgagcaagcttgggaaacaaaaaataaaactgtgcttacgcatcatccgtggacacattaggaagtttagcgtcaacagatttaatcacggaatagaacttttgcgacggggatgatggtggtaaacctcgattaagactggcaccctgatacaagtacggtcaaattaagttgacatgataaaaatatgaaataaataaatctctagattagatctcttaccgtaaaggattgattgttgctgagagaaatgttgctgataaattccctgtcgatggtgctagcagcaacggtgaaggaccagggtgcaacgtttgtgacacttaaaggtgatggtccatcatttccagcagagcaaacaaccactatgtttttggcgactgcatggagtgaccctatggaaatcccatctgttaacaaagcttcattatagggattagacgcacccacagaggctgagatgacatcaacaccatcataaatggcatgatcaaatgcttgtagcatgtctgcttcatggcacccttctacgtccagattattccagcatgctttgtaggctacaacacgagcttttggagagcctcccttagcagtaccattgccgttaccttcaacatttgcaccgcgaacaaaattaccaccagcagttgacagtgtgtgggtaccgtgccctacaaagtcacgtccgctgcgtagccttgggtcaatcttcttatcttcggcctcccgattttttagaaaaattcttgctccgatcaatttcctgaatattcatcataattataataatattagggctacatgtgatagcaattagcatcaacgaattcaagaatttttcttgacatgagcaataaatagtttataatatatttttttttaaaaatatcataggaatttttataaaatatataatgttatgataaaaataataatccaaaaggctccaaaattgcttgcatgctattatgatactcatttatttatttttggtcttgtgactcttggaaaaatgattggggtattcttgttcttttctgaacttggatttgaaatatggatttggagggcagagaatatattctttatataaaagaaaacagactttttcatatgaaaccacaatagtcattgtgtaggaactttgtgtactaactttctttattgtactcttttttacttatttgaataataaaaaatagtattcttatttgactaaaactatagtttctatccatctaggatactttcacactgtttcctttatttcaaacatatccttaataaacacaaaaatacgtaatactcctctataatctaaaattaaaaaaatacatatataatagaatagctacacctatatttctatccatctaatatagttaatttgatagtttttctttagtttcaaacacatccttaataaacataaaataaataatataatagaatagttaaattattattttgatcgccctataaatcataatctaatattttgatgtctatttttttcaccatattagttttcttattttataaaattcacaattttaatttaatcttaattttgcacacttttttttacattttaactaacattgaggattgaaaattaaacatttaacaaactaaaaactaatttaattaattaaaacaaaaaagtgtataaaattaaagattatattaaaactgtgaatttatttaaaataaatgaattaaaattgcgagagtgagaatataagagccaaaattatacaaataaaacattaattaagctgtaaataaaataacaactaccttccattgccgtgataatcacaacgttttaaaatatatatattatttcacgctcaacccaattttgaaatgaaataacagaaaatttacctgttacatagataactctttgtaccattaaaactgtcgatctcacagacacccttcccacgccactttgaagggacaggtccgtatcctttgtcgcggaaactcgggtgttcgggccaaacccctgttcaagaagcaactaacgtatttacaaaaggaaaatatgtttggaagaaaaaaatgtaaactgaatttagagcacgtggaacagtagtcaaaaagagattaactaagcatacctgtatcaatattagcgatgattatattttctccaaatcttgctttcctccaagcggagtttgcaggaatttttccatttttttccagtccaagaaaatcccatgacctggtagtgaacaatttgtgctctttgctcaagaaaatagaaactacatttggattttctgtaccaatagaaacatttaatacattattatatcaatttgtggggcttcaagatgacaagaaaatcatggcaatatatggtaataaagtttgctcacttgcaatctgtgatgcttcttcctcttcaagtagggcagcaaagccattgatgtgcttattgtacgagtacataattgcttccttggccctctcatgactgttaaattatcaagttttaattaacacgcacgtcctaataatatttaacataatttaacatttgtgttaccttcctaagtaagaagcgagtaaatcatgatgggagtttgtggctgtttcaagatcacttggcaaagggtctggaccatgagaatgtcctcccatgtacacaatgtaggtctgaaaacacagaaattcaaagcacacaattggtgaaatgttttatggtacattaattaacaaaatataaatttggaaattctcaaagttggaacttgaagagatgatggcaaaactccatcagattctttattgaaaaccgtaacgggggaactaaaaggcaaaagctagctaactagcctttctaagggcattggtagtttcctgcaagaaaatgcagagaaggaagaatgacagaacatgtttgaagatggagaatgccataatatatcttcagttgttgttttggtgtggatgtaatccatggctgtgccactacttatatatatattccatcttaattttattctattcttttctttctctcttcattgttcattagctattatatattatttagtatatctatcattctctttcttttatttttttctctctattattttgagttgttttgtgctcataatgagatagttagcatttttaagaataaaaatttattatcaagaactcaatataaaaagagataaagacatatcaaaatttatctaaaaaaaagttagttaaataagatttaataaaataagatataaatttatagatatcatcatgttttattgatctctttttagtcatttttttatttattttctcctccttttattattttttctaatttttttatttatcataaaatttatctatcatatactccaattaacttagattaaaaatgatgtaaatattgattatttttttaagtcatacacaccactaaaaaaaacagagtatgcggttatcatcgctccatattataactccgctttcaccattttctagaagcatgattttaatatgaaaaatgaatgatatccgaaaggtatatatacttgctgattgataaatatatcatcctaccaaaagttgaaaaatatagtaaataatgtgatataataaaaatataataagacgcaaagaatgtatatattatgaaggtctttgcgcataatgctttactattggctttcgaaatttgcctacgccctcttccaccaatcaccatatgtcattgactaaaaaaaagtctttcactccataagggtccgcttggaaggaacacaaataaaagaagaaaaaaaaccatgtatttctcttatttggtttgagaaaaaatataaaaaaatcaagagagtaacccacttttagaaaggaaaaaaatttacaacttttctatttttaattttttctccaatttaattttttttttcttttattttttcctcttccaaacatagggtaagtctagctctgtatcttacgtaactttcacctattttcattacatagacaccagtgacatcatcaattttattaattattacttattgcaaattgcaacagcaccaccgacaattttgataaaagatcctgcttacagctcttccaacatattgtggccctgtagaagacgcaggtcgacagcataaattattcggattagggctaggcttcctatcattttttacgttattttcaatttctacgtaaatactatctttctaccaaatataaatactgtctttctgtataagccaaacaatccagtggcattagtttgtaacaatagaaagaggaggagtatcaaacatggggaagtgaataactttctcagcaatgggtaagttacataatagatttattgatttgataattttttttgatcgtatatttatttgataatttaatggttaagatagtagtcactaacctgttgtaaagattttaagcagaagtttatgtaattacaaacagtgcatgaattttatatttaaagcagttttgttaaattatataacaattaataatttacgagaaaaagtagttctcgatcacgtgaaacattccaggccacttaattttagtacagacgttgcataaagtgccttcttttcataaaatatttcaaatcaataactttttaataaaaaaggtaaaaaataaaagaaagaaagaaagaaagaaaaatccctgtttgattaatcaaccaaagatataggtatcaaaataaatagaaaaaaacaaagataaaacaaaggaattaaagtgcacaaagttcgagattagaattagttaaagtgcacaaagttcgagattagaaaggcaattttaattattttttatgatgtatttgatttagaagatcagaataaagagaatagaaataaaataatttttttaaaattaaaataaaatataaaatgaatgagtttccctaaaagaatttacaatttctctttaatattatttttaaacatattcttaattttctcatacaacacacaataccaaaagtcataccaaacataagtttaagaaatattttattgacatagatttagactaaaatattttcaattttcaactacaattatcacaaattattctataaatcatactttttcaattattcacaataataaataaaagtaagaactgattacgagttacgactactccttccgtaccaaattgattaatgttttagcgtcataagaaattctatattgaccaattttaattctgtcatctaattaataaatattattatcttgacacacttaataatatatttattgaaataaaaaataaaaaatattataataaaattgtttcctaataaattttattttcatgattagcgtctcttttgaatacaaatattaatttatcctcttgatgataaaattgagaaaaaaaggttaataataaacttgtaagtttatttatttttcgtaagttatgaaaaatttaatttaaataacttatgaaaaataagttactttaacttacaaaaataaattacttgaggtaagtttgtgtatgtaccaattacaagctttaaagtaacttataaactagtaaaaaattataaattttttcaagaatcttaccaaacataagatctcgttaaaaaaatatcataaaaaagttaaaagaatcaaaattttgatacaaaaccaaaagactaaaaaaagtattactttggaatttagagggtatttttactttacttttactaaaagaaattaaataattctcaccataaaattaattcaaacacacgatactcatgtccgcgtagaattctattgattaaccatataaaaatctggtagatcaaaattaaaatatgtatacattatatattttgcttaattataatttttttgagttaaaaataatttaattttatctcaaattcatttattttttttgctaaacacactatacttttttctttttcgtgaccaccaccactgctacctaccataacaacagagaatatatgaatgcttgacctctcttcctacgagccttctccatctccaataacaatcacagccaatttatgtattgtctctgttttttaggagagaaaagataaagttattccaaagataatcataagtcaatgactaattgactatggccacatcaccgttcaaaaaagaggaattttgctaagttgattttcaatataagatgtttgatgaattttttaagataaaaaataatttcttattttttgtagttagagaaaatccaattaatattgtagattttttaaatttaaatctaagtattttatataaataatttatgttacaaattcttaaaaataaaaaataattaaatatgctctaagtttctcttccatattcactcgggtaacgaaaatgctgcatgttttagccactttgttcatgtacgtgggggaataagactttttttttttttggtggaaaaagattaggctccgtaaaaagcgaaacagggcaacagccatctattaaagcacctccaagtccatcggatccgaggtggctgatgtggtgaaacttaaaaaggaacaggttcttggtaaatattcttaaatttactaggaacactatatatttgcagtgaatatttaaaattgtattgctgaagagaagatagtggacatttaataactaaatgacaaactttaacatgaattaagaataaaattcagttacattacaatctagaattatatgaaaagaaaaagaaacaagtaaaagggtagaaattatccctttctttataaattggagatgaataaaaaaaattcttccaagaccttacattgtcaagccttagccctttattcttgttcagggttttctacgtatgtccctctcagtttattatgaaaaaaaatcataggcttaaatacttgtttggtatttataatttagttattttttcatttttatattggtatttttttttgttttagtccttttaaagtatgtttattttatctttcttctttaaaatgctttagattgtaatttgaacaataaaataaatattttgaacaataaaaaaatattatttaaaacgttttaagaaaaaatattttataaaaaatcatttttttacaagaacgaaaaagaaaaaaaataaattataaaaacagttgacatattttataatataaatgatatgttgagatgctaatgactaatttaaaataaattatctttcttcactttaagaaaagtgcattatcactataaaaaaagttgcctagcaataaaagaaactcagaataaagtaaggaaaagtgtgtttggaaacgagagaaaggcagtataggtgtttttcttccctttgtctcaaacttgatacttttatcattattattattaggataaataattatttttatttttgaatgtgtggaacacggataaatttgtctataaaaaatgaaaattttaattttaatttctgaaaatgaaaaaaatgtgacaaatttatcaatatgttaattttcatctattatcgttaatgaatgagattatatgttacatttaggaaaaaatttgtcaatattttacattatgaaagggactatttatccaaaatataatttaatattcatctttctctcttttttaatcattgtaaacataatattataatacttaaaaaaatagaaaaataaacataaattagaacaaatataataataaatataatatttattaataaatataatatttattaataaatataattattcattaatctgaaaattctaatgagaatcaaacaaaaatattaagttaatccttatatgtatcatccccttgaccccatatatattccatttctaactcaggcaacaacgtaaataatttcatgttacaatgcatgattatatatatatatatatatatatatatatatatatatatatatatgtttgaatccagaaacaaccagcgtcgaaggggccaaagtttcacgtgaaatttaaatgtacaaattcgttaaattgtatagtgcggaccgcaatatatatgcatgatgtatttttggacattctgccacaaaatttgtcgacagggtatctaacattttagaattttgctagctcattcctctctcaagaaacaaagtactaactacatggcacattagtcccaatttctacatggtatctgctagcatcaaataagttttttcaatgcatgaatcattaaatcaaagaatcttgttaatttgatggttgaaaactattaatattttatgcagtaattaatgtattttcagactaaagtacaaccacctataccttttggagtgtcttaagctttgtatttatgttggacaggtggctcattaacctgttaggtagtagaaatctgctgtgctgttttgtcagtcagtatatggatcagaaacataacattttgctgctgtatgaatgaaatacctctcacggttcttatttcatagaaacttcttgtaccagcaaaactattatgttacatacctctgtaactagtttttgtaaaaagcagtagattccgcaataatcaattaccatttaacataattggttgctttgcttggatactagtttctaaatactagttcagtaataattgattacttgtcatattaattgattacattgatctgaatgtgaaccaagatgttttcattgttttgttggatagtttaattgataattgtatttttagtctctcagtttttgtagtttaaatttcaatggcatcaattgataattgctagcatttcgcttaacggaattagcagatgtgacaaacagacatgatatcagtaagtaaatagagttttaagatgtcatgtcagtatgtcacattagctaattttgttaaatattagatagaatgaggatagaggaacctcatgataaatgagataaaattcaaatcacacacttgtgacatctgaggaactaaaaatgcaaaataaaaaatctgttataaatgttgaaaaaaaaaaaattgcactttaaattctggaaaagaaattctgatagaaattatgctattcctgtagctaccacacaagataacaacaacctaccaattcgggacgcctttgatcagatagcaactccatttgattatggctctggacatattcagcctaaccttgctatggaccctggacttgtttatgatatgagaacaagggattacttgaacttcatgtttaagataaactaactaaaagataatcctaattctaattgatcagctcatctggtagtccttgaagtgcatgggtgttttggtgtccctcttgggcattgtgtatgtttgggctgcaacaaattccaggtcgaataaacatatgactagtttacttcttataaggcttagacagtctctagcttacagtttaattttgtgagatcctgataggtcttaaacctaaattttaaaatagctatagagcatatcataaatctgttattgggcatttgggtcacccaattgaggtcttacaaagctttggcattcctcaccttacagttttgtggggttaagatcaaattctatgataattaaacccctaatttaggttttttctagctactttcatgttgtcaccttgtattatttttcaaaattataggaagtgctagtgtactactggtattgctttcagtgcgagtgatttaattatctattgttattgactttttaagtcagcaaattgttatccattgtatataacagtgatccatgcatccagcggatctttgtgatgtattttgctgggcctttgtttcttattttgcagcaaatctgtttaatatttactttaggattgcagaagcagaacatagtctctgtattattttcgtttgttgaataagtctttcaagtcagtaattgttttttaatttgggaaaatgtttttaatttcctttttttttgtagattaagattactgggatattgaaaagttgtaatttttatgtttattacgagtggtaaaaatgttggctgatagtaaataaagtagaattcctacatatctaaattgtaaatgttggctctcaacctttcttctgaaaaacctaccgagtttcagaatttatcaaatttcatgatctttagacatttcctttgtgcggcatacaatgatgcaagtttatgtagagctaagtttattttcttttctaaatgtatgctatatacaatgatgcagttaatctgattaaccaacctttttgacttggcctccttatgataaaccgtaacaaccttatcatcagctttcttatcaaaatatttttttaatattctgcccattgataccagaaacatcttgtttgggctttatgtgatttattttgctccattttgctgctgaactttttttttttttttctcttcttagaattaagagctgctgaacttacttcagtcatatttgcctattcaaatttgaccttttggtttgggctactaaaagttcaaatttaggttccaacaattatacatgaagtaagattagtactatgaaaattttaatatatatttttaatatatttatatattaatatagattattaatctaatattttaatttgtaaatacatcgtgtaaacaccaattaaatagacattactcaatgaagttaaatataaatttattatattatttagcttatattattgtaacatttgtttcctgtaatataattttattatttagaatttctcattacttacatttatgctgcaattactatataatatatattaagttgtattaatattttaaagtataatgattatattgaacattagagaatcattttaatatttaaaaatacatgcatcgtgaattttatatataatatagatataattatttttcaaaaccaaacttgtcggcctggtcaccacgctagaaataagaacatcatcgtctgaaatacattaacttgggcattcctttttttattattattattatttgtctttttaaaagtgaataaaaatttaaaatgatataaaaaaagagtgaaagtaagtaaagggtgcaatcaatactctttcctttctcactttacacttagtctacttataaaagctgaatgcatgatcaatcttagtcttccactatgtatatcttgaagaccttaattagtcttccactattatcttgaagtctttgttggttttatttttgtaaccaaccttaattggttaactatacctatgggtagtcataactatttcttatgaatagtcataactattcctatagttaactactgtaatattcctgagtcccagcgcgtttggcgcgagtttgggcgcgtttagcgcgagtttgaggcttttggagggagattatgcagaaaaaaccctcagcagtttgtttctgcataatctggcgcggccagtgccaggtacggcgcggttagcgccaagggccagaagtgcggcgctgatggcgccatagtggcgctcatggcgccacatcttctgcaggttggcgcctggggcgccaggggtggcgctggaggcgccagacccctctgagttttccagctggcgcggttggcgccaagtgtggcgcgggtagcgccagagtttctggaggttgacgctcagggcgcgggaggttcacgcctgtggcgtgggaacttctggaggttggcgctcttggcgcgggggttggcgctcttggcgccagaggttctggaggccggcgctgttggcgccggagttggcgctgctggcgccgtgattttgcagctggcgcgatcagcgtcggacatgacgcgatccgcgcggcagctcggacagacccactataaaaggcctagggtcgcgtttggggtccaaaaacactctcctcttcttcctcagacctcccacctccattgttgagtgcccaagcttcattccttcaccattcttcaccaaaaacacttccttaagcttgttttgtgatggaaatcactcctagagcttgaatccatcctccattcatcttaaaacccactcattttgaggatccctttctcaagggaagttcgtggaactcgagctcggcgaggaacgacgacgattcgtgagtacccaagctaggggaagtcgtccttgggccttccttgcgtctattgaggtaagaaactcgagaatcatcccttgatttgtgagttggggttttgggtgaatagtgacccacttttgatagagctagttttagccttgggtcatgttgaagcatgtgtttggaatgttgagaggatgtaggattagctcttagaagtgaatttggtgaatgttggttccatggctctttgtgaagcatgtgtgtgttgttgggctgagttgcttagccattgttggacatgctagagccttggattgtggtttggatagccttgtgaggctattgttatgatggcttgtgtatgccaagctttgttgaaccataggttagatgacttgtggtttgggaaggattgtgagtcctttcgttgtgcgcggttgtgaaccgcatttgtttatgccttgtgaggctcgttgttgatatatgcttgtgtatgtgccttgatagggcgtgacaccgcgggtgtcggtggcgtgggccacggagagagggaagaactgcgaagctcggctttgccaggtaagttcttggacccttggggatgtttcccattgcttgtgctctaccatactccgagggagtagtggtttcattcatgactcatgcattgtgtttgttgcatgctcatatatgtacatttgcttgtagctgtgcttgatattgtattaagcctgtgattagatcttctggccagtaagatatatatggacctccctaggagagagcgcaactcctagtttggctggctctggttgactcggtcccgggatgcggagattccctgaggccaagagctaggatgtgtaccgttgcggtctgcctagtctcggaggtaccatatgcgtgcatccatgcgtaaagaggtagcacccgatgggatggcacgggtgtgaattccggcttcacactgaggtaggcgttgactcggtccgccgtacatagagcaccgggttggcatgctttgtatttgtatgagaggccgggatggcccagtgttgtgatatcatgatgttgcgtcatgatgagtgagccagggtggaggagatgcctccaaggaccctgagcttactgagatgtttatctcaccccgtgtggggcttatgttttcaggtgatgcttctggtagaggggagcagtctcagggcgggaggccccagtagagacggtaccagcttggccttgggcagctgtggatcgcttggagctcggctcagcatctgtttatgttttgatgtacccctgttgagggaagacatgtgttgcacatgtgttttgagttgtattttgctcagttgatgtaggccctcttttggaggaagaacccttggggttagaagcactcggatgctattctttgtatgcacctcgggtgccagatgttgtatataactcagttattgtatatgatgtggtttcctcctgtttatatatctttgagatatctgttatctgcctatggttggtttgtttgatctggttaagcaggggcatgttgatgcttgttgtgggttgtgattccatacataatgttatcgagaaaatatggttttcggtttatgcttccgcagtaaacatattttacggttttaattaactatgattaagcgctaatctgatgattatataatgataatacgccgggtatacacggggtgttacaactacctttatctcaaccgctgttaaccgctgttaacttcccatcataaccatacatacataactacctttgatggaaaggtctatatataggtgtgtatcttcaatttctggggtccctgaactcactcacatataaagtgcatatacatcatccagtgcaaattgagagagaagagtttggaagactcaagaaatcacttcacattgcaatattacaacccaattcaagaagcaatggcgggaggtatttatattctatttcattccgcattgatctaatattatttgtgaaaatgattagatcattaagtatatagaaaaattctaacatttggtatcagagccaggttcaacctctgccttgtttttacgttttgggttttactggatattttgatttaaagtcaataaagtttaattttaagaatcataaagaaaataaatttctaatgattctggactttaaatcatgaaaaacggtataaaattttatgaagtgtgtgtcattttattaagttttaaaacgacaattttgcgtgcttctatatccttttgcttaatgttgaagacaacttaagtttgtgtcgttttattaagtttcaaaacgacaattcctttgattttgatattatcaagataaggtgcatgttcttgtacttttactctgaaaaataaaagcaagttcttattttcaatgcttttatgctgcaagaaatgctatgttgtcatcttatgctttataaatccatatcaaagataaaatattaaattatattattgagttatccataggaatggaaaatataatttgatagttttatcataaagtatttataatcaataaataaatgtttagtgatctttataatttaattaattaaggtttagccacaacacccttagttaattaaattacaaattcagagcctctagatcacataaggaaaataacattaattgtaattagtcgtatgtaatatgataaatatcatctcacaagattatttatcatgtttttgtatgattaattaggataaaaatattaatttatgttcttgatttgcccacaggcattaagaaatataactgatatattttatcattaagttcatatgaattttattgaattaaaattttggcccacaggcaaattttatgtcactaaattcataattcttttagcatgttttacattggtaaagcatgataatgatttatttttgtctcaaattttaagaataagcatatattttgcaattgtacaacctgttagttctattgaagttcctgaattgagagggggcaattacccaatttggaaggagagaattctcctaaatttaggatatatggacattgatgaagctatcagaaaacctgaaccaccagttattattgagaacagtgaactagatgaggtggatcgttttgaaaaatgggaaagatccaaccgtctgtgtgtcatgttcattaagaataagatctctgctggtattaggggctcaatggaaaagcataacaatgccaaagtgctcatgaagtctattgatgagcaaattgagatttcaggaaaagcactggctagtactctaataatgagattttcatcaatgaagttcactgctttaaggggtgtgcgtgagcacattatgcagatgagggacattacggcccaattgaaaactttggaggtggatatgtctgacacttttcttgtccattttatattgaacactctcttagcaccatatggtcccttcaaaatatcctataacacgcataaggacaaatggtctattaatgagcccatgaccatgtgtgttcaagaggagggaaggttgcaattagaacaaggagagagttctctactaacaattgagaaaagtgacaagaaaataaaatataagaacaagggaactggtaaaataccaccccaggctggaattaagaaggaatcatccaggtgttttttctgtaaaaagaaagggcacatgaagaaaaattgttctaagttcaaacaatggtttgaaaagaaagatatgcctacctctttagtctgttatgaatctaatatgattaacataaatcataacacatgatggattgactctggttctacaatctatgtttcaaataccttacagtgtatgcaaaacttaaggaatctagtgggcagtgaactgtacatctattcaggcaacaagatgagttcacctgtggaggccattggaacctgcagtttagttttaagaagtggttttattttgaatttggaaaagactttttatgttactagtttttctaagaatttaatttcaatttcaagacttataccatttggttattctttttcatttcatgagatatctttcagtttattttataattctgatctcataggaaatggtattttatgtgatggtcttttctatattaatttgcaaaatgataccacttatgacgctatgcatgttaatgttggcattaagcgatgtgttatgaatgaggattcctctatgttgtggcaccggagattaggacacatctccattcagagaattaaaagattagtgaatgatggagtacttagtactttaaatttcactgattttgagacttgtaataaattgcattaagggaaagcacaaacaagtctaaaaagggtgccaagaggagtaataaattattagagattatacatacagatatctgttgtcctgatatggatatatatggtcagaaatacttcatctcttttatagatgattattcatgatacatgtatctctacatgcttaataataagtatgaagccttagatgcttttaaggtatttaagtatgaggtagagaatcaatgcggtaagcaaattaagatcgtgagatcagatagaggtggagaatactatggtagatacactgaagatggacaagcacctggtccatttgcgaggtttcttgaagagcatgtgattgttgcccaatacactatgtctggttctccgaatcagaattgtgtagcagaaagaagaaatcgaacattattggatatggtgcgaagtatgctcagtagttccaagcttcctaagttcttgtggaaagagacacttaagacagcagtgtacatattaaaccgagttccaactaaggctgttccaaaaacgccatttgagttatttaaaggttggaaactgaatttacgacatgtacgcgtttggggatgcccgaagttagaatttataacccacaagaaaagaaacttgacccgaggactattagtgggcatttcattggatatgctgaaaggtctaagggatataaattttattgtccatctcacaacactaggattgtggaatcaagaaatgctaaatttcatgagaatgacttgattagtgggagcgatcaatacagagactttatttctgagaaggatcattcagttgctcaaccatccacttcaaacgcaagattgattgttatccaaaatacccctccagttcaaccgggtgttatacaactaatcattgagaatccacaatctgttactgatattaatctagtagatcaagttgttaacgaggaacaagaaattgttgatcaaccaattgagcaacaagttcatcaagataatcgtgatataacattaaggaaatctactagaataaggaaatcagcaatacctagtgattatgttgtgtatttgcaagagtctgattataacataggagctgcaaatgatcctgaaacgttttcgcaagccatgagttctaaggaatcaaacttgtggtatgatgctatgaaagatgagatgaattctatggcatttaatggagtctgggatcttgttcagttacctgatggtgcaaaagccattggatgtaaatgggtctttaaaactaagaaagacttgtcaggtaacattgagagatataaagctagactcgtagctaaaggatttaatcaaaaggaaggtatcgattataaggagacattttctcctgtgtcgaagaaagattccctttgtatcatcttagcattggttgcacattttgacttagagttgcaacaaaaggatgtgaaaacagtctttctcaatcgaaatctagagaaagaggtttatatgaaacaaccagaaggatttttctctagtaacaatgagaaattggtgtgtaagcttaagaagtctatatatggattgaaacaggcctcccgtcaatggtatttgaagtttcatgatgttatttcctcatttggttttgtggaaaatattatggatcaatgtatataccagaaggttagtgggagccaaatctgttttcttattctctatgtggatgacattttatgatctttataatttaattgattaaagtctagccacagtaactttaattatttaaattatattaagactctttagaccacataagaaaattatgagataccttcaagggactaaagattacatgcttatgtatagacgaactgacaatttggaagtgattaactactctgattcagactacgctggttgcattgattcgagaaaatctacttcaggatatatatttatactagccagcggagctgtctcttggagaagtgtcaagcaaccttgactgctacttccactatggaggctgagttcgtttcttgttttgaggctaccttacatggtgtatggataaggagtttcatttcagggcttagaattatggattccatttctaagtcattgaagaaatactatgataattcagatgttgtttatatgactatggctaagaataacaaaagttgtggtcgaagcaaggacatcgacattaagtatctagccataagataatgtgctaaagataatacagtggttattgagcacattagcactgaattaatgattgttgatcctttaactaagggcatgccaccatttaaatttaaggatcataatgatattgttttgataaaactctattgtgatgttttcattcagattatgcgcatctaaagttattcattttgagaaacatcaataaagtttggacctagaataaacgttgggtttattcattaagttatatgagattgaaaaatataatgcaatgtgatacatggaagataatactcgcatacattagaggacctatcaccatgattaatgtattttatttctcattatgtaaaggatgggatatgttaaccaagtgggagaatgttggttttatttttgtaaccaaccttaattggttaactatacctatgggtagtcataactatttcttatgaatagtcataactattcctatagttaactacctttatctcaaccgctgttaaccgctgttaacttcccatcataaccatacacacataactacctttgatggaaaggtctatatataggtgtgtatcttcaatttctggggtccctgaactcactcacatataaagtgcatatacaccatccagtgcaaattgagagagaagagtttggaagactcaagaaatcacttcacattgcaatattacaacccaattcaagaagcaatgacgggaggtatttatattctatttcattccgcattgatctaatattatttatgaaaatgattagatcattaagtatatagaaaaattctaacaatcttaactcaagaatgtttacattctggataagaataggcttttatattagcgaataagaggaggctctccaaaaggaaaaattttcaaactcttactataaaatggtattcaaggttttaaaaagtggtatccaatgagaatttctgctgcagtataaaatcaacgcagccacatcagttacatttatctgaaattttccacaacatcaaatactgcaatgaaactctaacgggacctgaccgtaatttaaaaccttggttgcatacaaccagtgcatacaaggcagcatgactaagcacatgccagttatttacaatgaaagtgcctaatactttaacccagtccatcagttcagatagtcatgtgactttagattcatttgtgtctcctcaagcagtatgcatattattgttaaatggtgttattttataggtcaaatttttaccatcaaaccaatcaattgcaatttggttcaatttggatgagtttgagataataatcacactacattccaacggttgaaaataagaaggggctagatgattttcaatcaatccaacagcacttcaactacttaattacattcatattggagttggaagagtgatctaactgattggaatcaaggaagcaagcatgcgttgaagtaatgcatttgatttagcctattttactttaagtttttcaggaattatttcaaaaaaaataaaatgaagaagactacttttaaaaaaaacaaacagttagcttttcaggaattattttgaaagtagattttagactactttagtttatacagtcaatagtcaaccaagtaaaccctatcactctttttctatagcgaacatataatttccttatctatttattattttcttaaaaaaatattatcaacgattgtgttacgtaataaactttagattaatacagcttttcatcttaattttttaaaaaacttattaatgatttttaacatcaaataataacaaaaaatatagtaatactttatttaccctatactaagtttaattacagtatctttttacttgatttaatttgactgattttttcatttgttaaatttcgtttaattgtatttatgaaattcatagtaattatttgaagaaaaaatattttaatcaattaaaattaatttgatttaattaattatttaattgattaaaatttctttcaaatatgagtcacaaatgttttcatttttttttctatttgaaataaatttaatccatgtatgctataattttgtgtaaattatataacatagatagtcattttttttatttgtagaaattaaagatagtatcaagaaatttacaacaattcatacaccatgtgttaattgagctaaatttctttgatatatatatatatatatatatatatatatatatatattgctgttttacaaaaccaatgaaatattaaatttattttcttttccaagaagtactcttagagtgcatttatgtttgttccacgaaataaaagtttattctcaagaatgctacataatatattttaaaaaatttgaaatattaattacatatctttaatagttgtgttaaaactataaaaaataattgtgtttaaaagttatctaaatcacaatggagagagtatttatcattctatttagtaaaagttttttatttctatagagttcaaatgattcttttcctaaccatgaaccattgagtctggcatggttagggtagcattggggggagtagagcagagcagttgaatctcaaggtactccttcctccctatggtatcctcccgatgtgaacaattcttaatttaaataaaccatcaaaataagtattgacatatatatatatatatatatatatatatatatatatatatataacaagattattgattttatgtaattatttcttttaatatttaaaacaattgaaacaactatacacagtacacaataacgctactccaaatgatctgatgcggtggtaatacaaatctggtacatccaaactaaactatgtaatatgccaaatattatttaatgctcaaatagttttttattattgaaaaattcatcaattttgtatttgatccttaataaaaacaaaaacttttgatccttaaaaaatattttattttatatttaatctctgttgttatattgattttgttaatttgagatgtcaccaattgatggaaaacattttaggggccaaaagacaaataaaaaacatatttcaaggagcacttaacaaaaccaatgtaatggtaggaaaaaaatacaaaataaaaaaattcaagggaccaaatataaaatttgtctatttttcaatgacaatagtaaaaaaaaatttattaaggactagctgcaaaattcataagtttctcataagaaaaaaacatttctttaagcttttattttatctcaaatttattttcttttgttaaacgtactttctctctttttctgttagtggctttacgggacactgtaccatcccctccttccccaccactactactaccatagagaagtcaaaattacaaggaagccaaaaacacaaagaaggatcttgaaactagaagcatactcttacaccgttgatgcaacttgatggtaatggagccgagaatttacccccttttttttttaccaaattaaatgattttgaaaattatatgataaatgattagcggataaattcatagcaaacgttaaagtattaaattgagagggaggaggctctccaaacataaaactttgtcaaacaaagctctataatgattagtgaatgcgtctattaaaaaaacaaaaaaaggtgcctgtcacaattcccataaaataatgcaaatccagaagtgaaactcaccaaagtctatcctagcttagtgaaacatcgcatccatatcatccccttcaatcttcatcttcccattatttctagctctcaggcaataatatcatcttgtttattttggaacagggacgtctaggtccgactcctctttcagttgtaatcgcaaattgcttctggtttagataaataaggtccaaaattcagcttatacttcaacatcattatcttatttgtttgcgacggattttttatgttagtgaccgattatttacttcagaaattcccatttctttagtggtttgaagaaaaatagtgtgggttaaaagagaaaagagataggtaaaatagaaatactaaattaatactatttatttaagtggaaaaataaaaaggagataaggacgtgaacttaaagcaaagacgcctgtgttgaaataatgcatttgattaggcaattaaggtctttgattttttgtataatgcccttttggctgaaagttgtaatactgtgttttgttgcggattttagtgttcttgggattttttccaattttttcaaaaaaaaaaatattgcatctgatttagcctattttaaattttttttggggaattatttatctttaaaaaataaagacaattgctttagaaaaaatatccctgatcaaaccactttgctttaaaaataaataaataaaatgaaattagatataaaataaacaagaatgaagcctcatatagtattgaacataattaagccatatattgaatagaaataatattaaaataaatatataaggggagaagaattttcactttacaagtcatcattatatgattaagttaaacttaaacccatatttaaagataatatggaaatctcttttaaggtcacaaatcaggttatctacacatcaaatctaaattttttttaggaagatgtataaatctaaatataaattttttgtgcaattaatgtatttgttattgttgagaaaaaatatcacattgattagagttgtacaaaatataaaatatataaatgaaaaataatcttataaattgatttggtaagatttagttaaatcaaaactcatattagctattctaatagtgtagaaatgtacattaggcatgtttaagctaaagaaatttacaaatggaattatattttccttagatggatccgttgaacaagacacaaaaaacttttagatagatttatccaaagacgacttcttctttcttttggtggacccaaaccaatgacttcctttcttttctttttttttttttttgtgaggaacgacttccttttgtaacaaccgtgagatggcatctatactagggtagggatagtattatttttttttcacatacactaagaaaaataatcactccaatatcatagtatttattagaaatcaattttactaaaatatttttattgttttcttatttttacaaatatattaatcagaaatatgtttgtagtctcttaaatatattaatttcttatattttataataatgaataaaacttttaattttgaagcaatcaaactacttaatttaatttaattaatttctcattttatgcaaatttcatataacatttatttattaaaattcataatacaacattatttataaaaataaatattttaatcaattgacatgtgatttaataaaatgtttaattgattaaacattgttgcatatatcagtcataaataatattaattttttctatttaaaaaaaaatatccgtataatagttttgtgcaaaatatataacatttgtattcaaatttattcttcaaaatatccttatacgagttttcttgtagattactaaagtcctaatatataatgggacttgggagtgtcttcaattaaatgcaatatacttcatcgagtggctaaccgttaacgccaaataattctcaaagaaatatacagtcaaaatatccttatcttacgaaaaacattacttttttcttttgataaagtagcttttatatttatttttatataaagtgactttatttattttataaagaccaaaaacatgactgtctcccttcaaaatcacactttatttattcgatcttacaaaagacataagcgactttccattattttccaagtctttaaagaacagaagaaacatacaaagcactccatcagaaacatacaaaacatgcaagagaaaaacattaatatcacgaaaagcttaattacagtgaacaccaaaagaactaaaaaacatacaacacaccagaaaacaagtttcaacactatttagatagttgaccaagtgtgatcatggggagtggatccaaagaagatggttttggcatcacaaactcgttatgcacttgttccatacttgggcgaaagcgtggattctcacttaggcaagcaaatgttaattttgcaatcaagatcacttcttcaacaattggcttcactggctgaggtagtcgctggtccaacacatgaattaatagcatattagatgcagatgatgaaaacaatgcagaaatgagatctcctggatgctttcccattattatttccaaacaaagcactccgaaactgaagacatcacatttctcattcacttccatagtataagcaagctctgtaatttatcaaaataataaaaatagtattataaaacaagtagcaggacttattattgaattgaaacaagtatatatataggattaaattcttaagaacaaaaatggcctaacctggtgcagaatatccatatgtgcctgcaaacgctgttatattttgtgaatcaggattcagaattttagctgttccgaagtcagagatgcgcgcttcataatccaaatctagaagaacattcttgcttgatatgtcacggtgaacaataggaggaaagcaaccatgatgcatatggtacaaagcacttgccacacctttaacaaccttcaccctcctttcccaatcaaacattgttgcacgtgtatcatcggttagtactttatccaagctaccaccctctatgaactcataaaccaaaaaggagaagcgtggatgtaaacaatatccaagtgacttcacaatgttacggtgcttgatttcggccaaggctttaacctcagttgaaaaagcttttgaatcgggtgtttcctcgttgggtgcagcatgaagttttttcacagcaagaatctgtcctgagtgtaatgttgccttatagacagatgcagttcccccttctccaatgagatatttgtcatcaaacctctctgtggcttccatgatatcttcatacactatttttccatcataactccaaagggaataatgatcctcacttttttcttctttatcctcctcctttttggcctttgttgctcttcggtagcaaatacataacgaaattccaaccaccaataataacagaaatagagcgccgaaagaaaggagtaatgccaacatgatgacatttcttttcattttaccatgaggtagggtgtggcaaggcaccaaaccggaggcatttccacacaagcctttattatttttcaatgcatcaaatgaagcattaagaaaggctggaatgttaggaattgaaccctccaattggttgttagatatgtcaacatttgccaagctattcttaaaatcaggaatggctccagagagattgttgtgcgagaggtttagcttttccaatctttgcatactcgcaagtgctgctggtatttctccatttagcaaattccaactaagatcaagatcttgaagagattgcaattcgttaaattcccaaggaatgctttcggtgaatttgttgttgctcaagttcaagttaagtaatttaagtaaagatcccacctgttttggaattgggccacctaagttatttgctgcaagctccaatttttcaaggctggacaaagcacctatttctgtaggaatgctacccaaaagttcattgtcgcctattgatagataaagcaaagaggtcaacttcccaagttcttttggaatttttcctgttagatgatttgaagacaaaataaggctctgtaacttgggcgcctggccaagttctaggggtataccaccagataaattgttgttgcgcatcataaggcttgtgagattaggacactttgcccagtttggtgaaatgtggccatgaaaattattgctactcagatcaacgtagttcaactttggatatacaccaaaagcatcggatatatctccggtcatctggttttcatctagtctgagtctagtaagactggagcaatttttcaggcttgttggaactggacccgtgaaatgattattttcagcagtaaatatttgaagtagcccaccaaggcaaatttgttgtggcaaggggccagtgaaactattgtttgttagacgacagagcttcaaattggtaatgttattcaacgctggtggtaatctgccttcaagtttgttagcaaagacactgaaagcgtcgaggttggtcaaatttccaatggtggaaggaataattccagagatattgttctgataaaggacgaacaactttagattgaccaagtttccgatggaggtaggaattgatccagaaatcatgttcatctcaatgtccatgcggaccagctttgtcaagtttccaatattggaaggaattgaacctgaaattttattttcatcgatttgaaaaacagtcaaattgaccaagtctcctatggaggatggaatggagccagaaattctattggttgagagctgaaggaattctaaatttgtcaagtttgtaattgaagtggggattgtaccagagatagagttttgggacaattcaagtctaacaaggttggacaaccttccaattgttggaggaatggtaccagaaagtcgattcccttgaagtattagaagcttcaagttctgcaattctccaatctcctcaggaatagagcccgaaaggctattgtattccaagtttagaattgacaagctagccaacttcatcatggaaatggggattgagccactaaaattgttgtgactgatatccagagttagcaacttgggaaaggaagagaagttgagagtgtgaagagtaccttttagccccaaatttgtaacatttatggcagtcacagcgttggattcgttacaaacgattcctttccacctgcaaggactgacaacgccacttgtccatgaagacagagaagcttggctttggttgtcaaggctagctttccactcaagtagagcacttgcttccgtcccttcataagcagtgatggcagcaaagccaaaagatgaaaacgtgaaaacttgggagcaaaggaggcttaggagtgaacggagaattaaacgaattaatgaaggcttggtgaaaaccatgtttgaactattgggtgattatggtaacgtacaatatatgttggacgttcaaagctaccatgttccttcctatatatatcgtaagcttcaaaattttatgatttctagtaaatttttattaataaaaaaatatttaaaatagtacgatattagcatttttttatggttacaaaattaataatgtttaaaagtatattacataaatagaaaatatatttaagccaaaatatatatttatttttaagagcataattttcataccccgtaaatataatttttttatatcatattaatcaataaaatatcattctatatataatttttaaactaattgttataaaaaaattatcatatataataatatctatttatatatatgaatgacggtgtattttcattaaattttaataaaataatatcttaattcgtaatagattttaagttagattgacattaattataaatatatattttttaatctatcttaaattttttacaaataaatatatatatatgaacatttaagagtaaatataatatattttttcttatgaattgtgatactctaacgtgtctttttcgccatggcttatgcacgttttcggcgtgacatagtaatctctccgtcacaatttggaatctctttaagatagttttagtatcctctggacaaccaattcattaatataaagaaatttaacttatcttatcttaatactatataatctatattaacattatcaaataatttcatattatgtcccctcaattaagaggcaagctcataaatacatgtatataaaggattaatttttttaaaataacacattattttatttgctcatttactacattcattattttctgtgtcagaaatctaacttaaacatcaaagtacttttacatatatttcacccttcaaaggatagttttgtcatataataagaaaggacaccccaaaaagaatgaaacaacaagagaagagtcagtattcggccattttaaaacaggaacaattttagattttgattctaagatgttcaatctttacctccctaaggccttctcaatttgagcagacacaaaaggaacataggctatctctctaacgtttggtttctgtttaaaacaagcataaattacaaaaacgttcccaaagtttcgactttattatacgacatcctcattttttttaacgatactttcagccccatcctttaaacagcatgcagaatcaagatctgtcccgactttcagttgccgccgcagaggacgatagcgtgattgaaggaggagcggtcaccgctgcgccgccgtcagagtttcgcacgccgcaccccgggaatccagatatggttctcactccttcaaaaccgtgttgttgaagtttttcacagggtttcttttaattcttcaatgggttcttgaagtttttcaaattttattgttcttcaatagtttcgttattggcttgttgttgctgtttggttgtattcttattggtttatctgtggagtgcgagatatatagaagaatctaatacattgagaaactactgtgacgttagttttgtttgttcttgtaatttcacagaacaaatttccatttttgaagaatttatataggtattaaacttgccatcgtgagcggattgggaagcagatgtgtgtggaaaaaaaattatgtttttcattgcctatcttaatttgtttttaaaatttatattctaattttttcgtttatagttaagtgaactccagatcaaataaatggttgaagaagtaaatggtcatttttggacagtgcttcaatttcatgtgctggaaatcaatagcaaataaaggaaatggtcattttttaccctaaatgtgtatgataaatttgttctttataataattatggctaaaaaaaattaaaaattaataaaataatgttattttcactgtaactggcattccgagagtgggatctggcgctcagagcgtggcattgtagtagaaggctatttttcgcgatttttggcgtcatcagcgccagagtggcgccaggagcgccacagatgctggaaactggagccaagagcgccaaagtggcgccagatgcactggattttggcgccatcaacgccagagtggcacgattggcgcggcatgtcggtcaggccaagtataaaaggtcattcacgcgtttttaaaggccaaaaacactatttctcttcttccctgacccaggcagccattgttgcaccataaaagcttcataccttcatcacatcccattaaaacacctcttaatcacctctaatcttggattgaaccacttaggagccaagtttcagcctaacctttgagagaaacctcattccttgagtttcttcagagagctgagtgttggaagaggaaagaaggcagttcagggacaccggagttgggagaaagacttttccagccatcctcgaccgatttgaggtaataaactcaagttttaaccgtttaattgtgaaatgggtaatggggtgaatagtgactcatttgagataaggctggaattaggctcaggttctttcgaaaagtatattcaggaggttgttctgagagatatggaaccttgaaactggaattgtgatgaagtttgagtttgactctgggaggaaaaagagtgtgtgaatgggaggtactatgacttgtatgaacttaagtacctttacaagagttgttcgtaaggccaaatgaacgctgaaaacatgttgatatatctgttttggctgagttgaacaactagtgatttttagcattagtgaactttgaattgatttgtacagagtcttaaagaaactctaaggctttagttaggctaaagtagaccactgagggtcattgaattgcctagtagaagctgggctatgatgaaccttaaattagaagacagagattgatagagaaaggaagagtgtttcctttcatataaattgttgaaaaccgttactgatgatttgactcatgcctaatgtagggcgtgagattcaaactgctggtggtggtcaccacgagactaggagagctgattctgagctgagataaggtacgctcatcgttcttgggacatgtttcccctgcttgtgtttcactacacccagaatgggtgatgctttggtatgtattgtatgctgatgttgtatgatgctagaatactgagatatgcatgtaacgttgagaaaaatgccctgatggcatgttggcaattgaatgctagctacatcctgagatagtgtatgcttatattgtttacactgggatagtgtatgcttgtatggattatgagatggatgtgatgttcatgctatgtaatgtgaattgcatgagaaattctctggccagtagaatagggaactatggaccccttggaaatgtgcccttgattggatgatcttccttgggacaatccatagacgtccatgtaaatcctgggagaatgtgcccttcattggatgatcttcctcaggtattgggcggcaagtcctgagggaatgtgcttttagttagatggtcttcctcaagcatggatagggagagtcctaagtaaatgtgtctttcagtagatgatcttactcaggtactcagggagaagtcctgagggaatgtgtccttcagtggatgatttctctcaggcagaatggtgttgattgtatatggttagactgtgctgctatgtgcatgcagctcgttcatgtgagccgtgaaggctgactgtatgatggatgactatttgatatgattcctgttatgctatgttatgttatatatatatatatatatatatatatatatatatgtttggaaaggaaccagagggagggaaacctccaagaactctgagtttactgagatgattatctcacccctatttgggactcatgttgcaggaactgagacagaagttgctgtgagatcccaaggcaaaaggcctgagctgggatagtatggtggataaccctaggtttagatgactgagcttgttagctcacattttgttgacttttcatgtattttgtacccaggtaggagatatttgtatagttttgaggaaaatgtaccttgtataagacagagattcaccatatatgtatataatgtgtatttatacttgattaaggcttcctttattgtttatttctatgcttgctactctgatattatgataatgttaatacgccgggtgcacacgggatgttacattcttgaaaaatgaaaattcaaattttagtccttgaaagtgaaaacattgtgacaaatttattcattcattaacttccgtccgttactgttaatgaaaaactctacatgacacaaagatacgaaaatgtcacaaaaataattatcaatatggctgtataatatattgaatcaaaatgtcagtaaattttcatttgaccaaaatgtcattaatttttcattagacaaatttgttagatcccaaattttatttcattttagggaaaaatctaatttatgataaataatcatttttgtccctgaatgtgtagagcactaaaaaattgttctaagagatgaaaattcaaattttagtatattcatttataggcattgcaaaattattacaactatttgtttgtcttctcagatcattcgcacattgttggaaaataatagtatcatcagatatttttgtccaataaaaacttaatgtcttcatgacattttggtccaatggaaacttactaacattttgatccaatctatacaacaatcatgttggtaatcatttttgtgatattttcatccttgtgtgtcatgtaagctctttcactttcgagaactaaaatttgaatttttatctttgaaagacgaatttgtttgtactctatacatctagagatgaaaatgactatatacactaatacaatattatcaaatgtctgaaagtagtaaaattgattcatttaataccattaatataatattctaaagtagactaatataaattaaaacaaaatattttttaacgagatttactataattatctgaatcacaagtcacaactattttctacaaattaatttcatgcaaaaaaatttagtgaaacccgaattgttataaccaaatttgctgaaataaatgaacaaaatatgatttatttatattaaaaatatttgtaattttaacacttgaatttcaatattaacagtatttaaaatcaaattaagcaattctaaaatttttgaatgattttaatcggtttaatttgattttaattgaatctatagatttaaatatatgatccaatacatacataaacgattttaatgagttcaatttaattttgacctaaatacaaaataattaacctaaattatccaaattaatttgaatcaatttaaattcacatatgactcatagcagttaacaacaaccctaatcaagacattcttgaaacataatatcattaaaagcccgtgtgtcaatcacgtgtgcgcttctcttaacaagttaagaatcttttagggtgagggactgagggggtggctgctattatgagagtattaaatatttaaattagaggaatttctttaggacgaaaaaaataaatgaatacttaatataataagtcaaaactttaagggaagtatgtgtaatttacagaaaatttttcctttcgtacatagactaccaaattcataaaaaggaaaaagaaacaataatcttatgttatgtttgattggttgaaagggaaaaaaaatttaaaatttgaattagaaaaaaaaatgagagatgaaaaagtaaattttatattaaaaaataacattttttttcattttctctctacattaaaaaaatatattcaattatttatattttcttttctctcgtttctctactatcagaccaatcctttaaatatgccaaattagatgcacgcacaataatattgccctttaatcaccgcatcccgcagtcctaattacctctctaggacctatgatcatagatttaaactattgaaggccgtggcaagcgtggggcaccctctcaaggcccccacggtgggaaagaaagatggtccgtaagattggaactttttcgagatgcgtgcagttccacagtagaaatgtttccactggatttttttttttctaaactgcatattattgattgtgccttttattttttatttttgacaaagcacttgaatgcaacatgagcagaaaacacgcttatattacagcctgaaaaacaacaaaagcaaacaaagtaaaatgacaatgataacataacaatgctgagattaatttctaagagtccagcactacgataggactagttactctgtgcttgccatctgtccaagacaaattcccaaataaaggaatgttgtgaccaggcacaccaattgcctgaagaataacctgaaacttctttttttctccagttttcttaaaagtcaacgaacttggttgcacaagaaccttaatccccttcggccagtgagtattcacaacatacgtgcttggaggcccaacatttgtaactgtacgagtaacattaatagtctttgacccaggatgatgcaccgtaattgaaggatagttgaaatcttcaattctgtaagacttgggacaagtgtaatgggatttcactttgccaaaaaacttgagtaaagcttggttgtaaccagaagcacataggaagttcaagtaatcggttgtgcttaaatcataaacaagtccagggtgaattgcaaggttaggctgaatgtgtccggcgccgtattcgaagggagttgctttcttatcaaatgcattctgaatcggttgattcctattatctagtgttgtagctggaattaataaaaagcatagtaccgtgttaataagccgccaatgatttgctgtgcatgaagattttatattgatattactttggtaatgaacgcaccagtagtcataatagcagatttgatagctgctggagtccaattaggatgatatgttttgagaagacctgcaacgccagcaacatgaggacaagacatagaagttccctgttgcacggtgaaaagaacccgacgtctatctgttgcaagattagttggacccgcggcttgtgaaaaagcagcaattatgctcacaccaggagctgctatgtcaggctgaaaaaagaaacaagttacggttagccacaaattcatctctaatgaatcattaattgtaagaattaaaagttaatcatcatgtcatgttggtgtagttaacaaaatgtatatattatagacctttagtatcaatggttgcacggaactgggacccctggatgagaatccagctatgattggagctggctttactcctatatgtgtttctgcagcactcaggtaagctaaaatctccctgcaacaacatatatataaattaatattcaagtgcttcacttgctacaaatatactatatatatagaataccacgtttcaaagggatttaatgatatattaattttacttgttattgccattgttgcctgtacccttccacgtattattagtttcctttccacctatacttgcagctggtaaaatatgatcctcggccagaagtaaatttccacttccctcatcattttgcaccaaaactgtcacagcaccagcaagatgaccctgttggacctggctagctgaagttaacttattggctcgaaggcagactagtatttttccctttactttggtaggatcaagtgttcccggtttgcaaagacgactacaccaaccaatacatatatatacacaaacgtatgagacgaatatttgaaagcaagcttgggaaattaaaaaaaaaaaaaaaaaaagaatactgcttacgcatcatcaatggacacagtaggaagtctagcatcgacagaattaatcactggatagaactttttcgatggcgacgaagatggtaagcctttattgagactggcaccctgatatgatacatgtacgtacggtccaattatgtagacgttaagaaaattaaaaaaaaaaggttaaaatatgttttttttccaaatataaaaatatttgaaatttatttttattaaatttttaataaatttttctcctctcacaagattaaaatgtattattttttggtataaagataggctcagacatcggacttcatgtgaataacttttttacattcattaagtacacaaataattaaaaaatatgtcacattatacattaattatatacataaaaaatattacatttatattaattatatatatgactaatgtaaaaagtcatagtttagataaaaatcaatacatttcaaattttataagaataaaaaacatatagaaaatagaaaattttgtaaaaatgaatttcaaatatttttatatttatattaaaaagaaacatattttaaccgacaggaaataaaataatctctagataattagatgatatatcttaccgtaatggattgattgttgttgagagaaattttgctgataaattgtctgtcgattgtgctagcagcaacggtgaaggaccagggtgcaacatttgcgacacttaaaggcgatggtccatcatttccagcagagcaaacaacgactatgtttctggcaactgcatggaatgcccctatggacatcccatctgttaacaaagcttcgggatagggattagaataacccacggaggcagagatgatgtcaacgccatcataaatggcttgatcaaatgcttgtaccatgtctgcttcatagcaccctcctgcgtcgagtttattccagcatgctttgtaggctacaacacgagcttttggggagcctcccttagcagtaccattgccgttaccttcaacatttgcaccgcgaacaaaattaccaccagcagttgacagtgtgtgggtaccatgccctacgaagtcacgtccgctgcgtagccttcggtcaatcttctcatcttcggcctcccgattttttagaaaaattcttgctccgatcaacttcctgaatattcatcataattatattaatattaatattatggctacatgtgatagcaattagcagcgacgaattcaagaatttttcttgtcgtgagcaataaatagtttcaaatattttttcttaaaaaaatatcagagaaatttttataagatatataatgttatcaaaaaaataaatccaaaatacgtacttaaactctgtgtggatgtgtattagaagagctgaagactccaaaattgcttgcatgctattatgatactcatttatttattttggtcttgtgactcttggaaaaatgattgggtattattgtccctgtctgaatttggatttgaaatatggatttggagggcagagcatatatttttttattataaaaaaatggactttttcacataaaaccacaatagttgtgtaagagctttgtatattaacctgtcatctttattgcactttttgatagtaaaaagtagtgttcttatttgactaaaactatagtttgtatccatctaggatactttcacactctttccctttacttcaaacacatccttaataaacacaaaaataagtaatagaataattaaattataattttgattcatctataatctattttttttttaaaaatacatatataatatactaaatacacctatatttctatccatccagtattctagtatacttttgtagtttttctttcgtttcaaacacatccttaataaacacaaaatacataatataatagaataactaaattacaattttgatagcctatgaatcataatctaatattttgatctcaattttaatttcctattttataaaattcacaattttaatttaatcctaattttgcacactttttttttacattttaactaacattgaggattgaaaattaaacatttaacaacaaaaaactaatataattaattaaaacaaaaaagtgtataaaactaaagattagagtaaaattgtgaatttatttacaataaatgaattaaaattgcaagagagagaaaataagagccaaaattatacagataaaacattaattaagctataaataaaataataactaccttccattgccgtgatcatcacaccgttttaaaatacatatattatttcactctcaacccaacaattttgaattgaaataacagaaaatttacctgttacatagataactctttgtaccattaaaactgtcgatctcacagacacccttcccacgccactttgaagggacaggcccgtatcctttgtcgcggaaactggggtgttcgggccaaacccctgttcaagaagcaaccaacgtatttacaaaaggaaaatatgtttgcagtacaaattcatgaagaaaaaaaaaatgtaaactgaattaagagcacgtggaacggtagtcaaaaagagattaactaagcatatatacctgtatcaatattagcgatgattatattttctccaaatcttgctttcctccaagcggagtttgcaggaatttttccatttttttccagtccaagaaaatcccatgacctggtagtcatcaatttgtgctctttgctcaagaaaatagaaactacatttggattttctgtaccaatagaaacatgtaatacattattatatcaatgtgtggcttcaagatgacaagaaaatcatggcaatatatggtaattaagtttgctcacttgcaatctgtgatgcttcttcctcttcaagtagggcagcaaagccattgatgtgcttattgtacgagtacatcattgcttccttggccttctcatgactgttaaattatcaaatttcaattaacacgcacgtcctaataatatttaacagaattcaacgtgttttaccttcctaagtaagaagcgagtaaatcatgatgggaatttgtggctgtttctagatcagttggcaaagggtctggaccatgagaatgtcctcccatgtacacaatgtaggtctggaaacacagaattcaaagcacacaattggtgaaatgttttatggtacattaattaacaaaatataaatttggaaattctcaaagttggaacttgaagagatgatggaaaaactttcagattctttattcaaaatcgtaacgggggaactaaaaggcaaaagcttactagcctttctaagggcattggtaggttcctgcaagaaaatgaagagaaggaacaatgacagaacatgtttgaagatggagaatgccatgatatatcttcagttgttgtttcggtgtggatgtaatccatgcctgtgccactgcttatatatattccatcttaattttattctattcttttctttctctattcattgttcattagttattatatattatttattttttctctcaattattttgagttgttttgtgcttgtaacgatggtcagaacatttgaatgttcaacaataaaaatttcttatcaagagtttttttttatctaaaaacaattagttaattaaaatttaatggagtataatataaattcaggaagaatgatatatatatcttagaaattacaaaaaaaattagttatttatcattagttttatctgtcataaattttaattaatttggattaaaagtaatatagatgttgattatttttttattcatacacataactaaaaaaagagagtatgcggtaatatttttattcatacacatgactaaaaaaaagagagtgtgcggttattttttttattcatacacatgactaaaaaaaagagagtatgcggttatcatcgctccctaatataaccccgctttcaccattttctagaagcatgattttaatatgaaaaatgaatggtttacgaaaggtatatatacttacttatttgataaatatatcatcctaccaaataaagttgaaaatatagtaaatattgtgatgtaataaaaataaaaaaaataagacgcaaagaatgtatatatattataaaatttgatgaaggtctttgcgcataatgctttactgttggctttcgaaatttgcctacgccatcttccaccaatcaccatatgtcactcagaagaaaaagtctttcactccataaggtttgaggaaaaaaaacatgtataactctatatttctcttatttggtttgagaaaaaataaaaaataaatcaaagagagtaactcacctttagaaagaaaaaaattacaacttttctattttaaatttcttttccaatttaaattttgaagttttcttttctctcttttattttttcctcttccaaacatagggtaagtgaagctctgtattttacgtaactttgacctattttcattacatagacaccagtgacatcatcaattcctacctctgttattaattattacttattgcaaattgcaacagcaccaccgacaattttgataaagatcctgcttgtagctcttccaacatattgtagccctgtagaagacgcaggtcgacaacagaaattattttttaattttatttaaattaaataaaatattataaattaatttttattagtgaggtttaatttctattggtgatgataacagtcataattctgtttaaataaagaaaaaaagtttacatacagaatgaacgaagattgagtttgatttagtaatgcaaagacaattacatgacatattagcatttgttagaaataaatgtgcaataacaagactcaatcgattatgtaatcaattttaattttaataatagagtattattaaatttttattatcatactctactataaaacgttttgagtcatggattgtattgtacgagtgatataaattacatataaatatatgaatattatataatcaagtaattgaaaaaaaaattaaatttttttaatttgatgtttgatgaaaataatttttatcacattttatttattttttaccaaatgattaatcaatatttttttcttatgatgcatcgaaaagggttaaaaatatataaattttatataaattttatttgtcttgcatttaataaaatttaatgtgactaagttgtttgctttctcatgtaagaggttagaagttctatttctttcttttagttattattattattattattattattattctcgctcaacttttcaagggagtagtgcgttacaataagccacagcagagatgtgccgcacgaattgaaatcaataaaaaaatgttgacacgctttaattagaacattttttttattcaataataaatagaagagattaaattaaactaagtaaataaataaaataactaaattaataatttacgagaaaaaagtactgctggatcacgtgaaacactccagcccacttaattttaagcacaaacgttgcataaagtgccttcttttcataaatttcaaatcaaacactttttaataaaaaacgtataaaggaaaaagaaatatccctgtttgattaatcaaacaagacggcgtctacggtacgagagtgaaacatctctcgtacatgcgaaagaaaattttgatcgctggatcgattttaattttcatcaaacggttattattttttaaaattttaattttaatttttttctttctttgtttactttcctttctacctttttgtttttctctctctctcacttctctctccgcatttccatctccgcgtttcggcccattcctgtcgccgccgtcaccctctgccgcctcccaccccaccatcacaccgcatctcccaacattccaatgccactggcaaaaacgaaaaccgcaagcatgagataaaaaatgattggtgattttttgtggttcgcggtggttttgcggtcccgttccctccgtggatctctcttccccaaacccaaccttgtcttctccaccttattctttttttcaggaaggtagggacatggttgcatgcgccaaagcaggttcgctgatggagggtcgcgtggatcctagcggagctcaagctcctcaccatgcgtgtgggggagaccgccatggccgccgcggcgttcaatgacgttgtcgcttggatcctactctcccttactcgaagcttgatttgtcgtcggagctgggtcggagagtgaaaggaggaagcaaggacaaattgggtgttttcattttcatatttttgtcaatcagatatgctcgattactagatatgtttacgagtagttgattaatatatggatattttcaatttcattgttttttacttctttctttggatcattcatggatgtttaacaattgagtttctttgcggtaagagaggctaagagtcacggtggagaagtagtgggaagaagaagagacagagaagcacaaagggtgaaatcggaaaattagaaaataaaaaaaagaataaaaaatgattttaaaataaatttgatctaacggtgtataataattttcgtatgatacgagagacgttttccttacgcacgctaaactgcgtcatcaaacaaagacataggtatcaaaatagatagaaaaaaaaacaaagataaaacacaaaggaattaaagtgcacaaagttcgagattagaaatagttaaagtgcacaaagttcgagattggaaagataattttagttatttttatgatatatttgatttagaagatcagaataaaaagaatagaaataaaataactttttaaaaattaaaataaaaataaaataattgagtttccctaaaagaattcacagtttctctttaatattatttttaaacatattattaattttctcattcaacacaatacaaaaagtcataccaaacatacttttaagaaatattttatcgacatagattcagactaaaatatcttcaattttcaactgcaattatcacaaattattctataaatcacactttttcaattattataaaagaacgaactgattacgactactccttccgtaccaaattgattaatgttttagcgtcataagaaattctatgttgacccattttaattctgtcatcggattaataaatattattttcttgatacactcgatagtctatttattgaaaataaacaaattaaaatattataataatttcaagaatcttaccaaacataagatctcgtgaaaagaaatatcataaaaaagttaaaagaacgaaaattttgatacaaaaccaaaagactaaaaaaagtattactttagaatttagagggtatttttactttacttttactaaaaaaattaaataattctcaccataaaattaatgcaaacgcactatactcatgtccacgtagaattctattgattaaccatataaaaatctggtagatgaaaataaaatatgtatacattatatactttgcttaattataattttattttgagttaaaaaataatttaattttatctcaaattcattttctttaggaatgcttgacctctcttcctacgagccttctccatctccaatcacaatcttgtctctgttttttaggagagaaaagataaagttattccaaagataatcataagtcaatgactaattgactatggccacatcaccgttcaaaaaagaggaattttgctaagttgattttcaatataagatgtttgatgaattttttaagataaaaaataatttcttatttttttgtagttagagaaaatccaattaatgttgtagatttttaaaatttaaatctaagtattttatataaataatttattttacaaattcttaaaaataaaaaataatttaatatgctctaagtttctcttccatattcactcgggtagcgaaaatgctgcatgttttagccacttttttcatgtacgtgggggaataagactttttcttttttggtggaaaaagattaggctccgtaaaaagtgaaacagagcaacagccatctattaaagcacctccaagtccatccgaggtgctgatgtggttaaacttaaaaaggaagagaaaaataaaaaagtaacttgttcaaagaaataaaaacaaaaaaatcaacataacattgatttaaataatattaaatttcattttctaaataagatttcagatttaatataatgtttagtaacaaaaaaaaaaaaaagaagatacataaaataaatgaatagttatttttttatttctctaaaatcaaatacttttatttttatcgtatttctcacttattttatcaaatacttcacttatatatatttttttcttcttctattaagcacctcctaagaaatgattattggaacaggttcttgttaaatattcttaaagtagcatatgcttataagaatatcaatttttaaaagttttgtcggtgttatgtacgtatagctttatgaacaataaattatttttctacatttcataattattgttattttaccttttttattttaacattgttgatgcttaaacattttgaagtcttattaattattttttcatatctacttctatttaaaataactatatttattcttaaatttactaggaacattatacttgcagcctaaacatgaatatttaaaattgtattgcagaagagaagatagtggatatttaataactaaacgacaaattttaacatgaattaagagtaaaattcaattacattataatctagtagtgtgagtctatcaacccttagttagaaagatctagaaatatatgaaaagaaaaagaaacaagcaaaagggtagaaattatccctttctttataaattggagatgaataaaaaaaattcttccaagaccttacattgtcaagccttaaacaagcaaaagggtagaaaatatccctttctttataaattggagatgaataaaaaaattcttcttccaaaaccttacattgtcaagccttagccctttattcttgttcaggttttctacgtatgtccctctcagtttattataaaaaaaagtcatgggcttaaatacttgtttggtatttataatttagtttttttcatttttgtcttggtattttttttgttttaatccttttaaaatgtgtttattttattttttatttttaaaatgctttagattgtaatttgaacaataaaataaatgttttgaacaataaaaaaatattatttaaaactttttaagaaaaaaatattttataaggattaaatcatttttttacaagaacgaaaaagggaaaaattaaattataaaataagttgacatattttataatataaatgatatgttgagatgctaatgaataatttaaaataaattatccttcttcactttaagaaaagtgcattatcactataaacaaagttgcctagcatagcgcataaaggaaactcaaacttgatacttttatcattattattattggataaataattatttttgttttgtttttaaatacgtagatcctgataaaatttattcattaaatatgaaaatttaaatttaaatttttgaaagtggaaaaatatgataaatttatttattcgttaaattttgtttgttatcaataataaaagagtatatgtaatatatttaaggttgaatttgaagaataaaaatgattatttatttaaaatataatttaatatttttaatttttaatgattagaggtataatattataataaatatttaaaaaaataaaaaaataaatataaattaaaataatataataataaacataatattaattaataaatataatttatcaattgctcttaaaattttttaatgttataaatagtaaaagagaagagaaagcaaaatgacagtgacgctttaaaggaatacgtttcgtttttactttaaattctatgcataattatagtatacatctaattaattagaaattattgtttgaataacttgtaaaatatctttttagtgttttatagaacagtcagaaaggattggtcactagacaccaactttttggtagtgtttgaataatttttaaaatattttttttttataaaaataacaaacttatcatacttttttcatattttaattgacacgtacgtcctaataattgcttccttggccttctcatgactgttaaattatcaaattttaattaacacgtacgtcctaataatatttaacagaatttaacatttgttttaccttcctaagtaagaagcgagtaaatcatgatgggaatttgtggctgtttcaagatcactaggcaaagggtcttgaccatgagaatgtcctcccatgtgcacaatgtaggtctgaaaacacagaatccaaagcacgcaattggtacatcaacaaaatataaaattggaaattctcaaagttggaacttgaacagttacaaaactccataagattaatgagaaacagtaatcaggaaaaatgggtaacataaatttactttgttttttttcttttcttttattttgaggtatcacaagtccttagatacactggtgtattcatacaaacacacaataatttttctggtagaatacttatgatgtatttagataatggtctgccaagccacatcacgttggccttttacatgagatgctatttataatataacatgacttttaacttaaagacatgattcttcacttgagtaactcttcacctaagaacatgactcttcacatgagtaactttttcacccagggacatgactcttcacatatctaatttattattattaaagtttaatccaacaaaatccccccataaactttaaatatttcttccgtcttcatccccaacatcttacaattttccatctccgacttgattttagcttgccacatgaagtaactcctccaccttctttccttttacttgatctcggatgaatggaatctgacgtcgatatacttgctccttttgtgattgactgggttcttagctaactcgattgctaacttattatctacatggatctcggttggactatcttactttgatgggattaaacacacaatccccttctctgttgggagcaacacctcaaccaaccacaaacactggggagtcaccagactcaaccaagaatagctttacgtgggagaaaaccttcaaaaggaaaatccacgagacctagtccagaacaatccactattctcaataataatggttacaatcactctcaacggccttcaaccggagacactcaacctcaccaacaacaatggtggaaacgctctcaacaagggttgctctcaacctctcggagatgctctctcaacagcctaatgctggagacacaaacgagaatcctctcctcccttttttggaattttgaatcttctcttccacactaagaatattactttttagattgggcacgtaatagacatctcggatgcgcccaattcgtccatctttctgcaagaaacaaatcgtacctcggcctttgacatcaacctttgaagcatttccaaacgaaacatgtctggcttctatttgtctcagattactgaacaaatgtttatgctcacacatatgattacttgcactagtgtctagataccattctatctcggatccctggttgacttcacttctagtcatcatcagaattcctccatctcttacttctccttttgtaacaaggtttgaagtttcattacttctttcatctcggcaatccttcgcaaaatgtccgacttgaccacagttataacatctgtccgagtttcaatctctcgactaatgtccatactttccgcatttaaaacattctacattcgattgatttgaatgtcggcctcttccactacctcggcctcgccaattctgccgacttgattcaacctactccttattccttccttcttgacctcggcctctaccccctcggtcatgtccacgacctctatctcgaaaattgtgagaatagagcgctttctcgtctttgattgaagcttttgtctggagtgcttgctccaatgactcttttttcctctttttctttctttgttcatgtgcctccaaggaaccagcaagttcgtcaaaggtgagcgttgctaggtcatttgactcctcaatcgcacatacaacattcttgaagccgtcagtgagagatctcagaattttctccaccactttggcatcggacaacacctctccatttctgtttagttgatttaccacggtctggacccgggtgatgaaaccggataccccttctccttccttcattttcattccgttgtagacatttgcaagaatgtcccacgcctcctttgaagttgttgcaccagcgatcttctcaaacccggaatcatcaacagtccggaataacatgtacaacgcccctttgtctttcaaccttgtctccttcaatgtcttgttctgcgctgccgtatatcctgctgtggatgttggttcctcaaaaccaccatggacaacctcccaactatcatgggctcctaaaagagctttcatctggatactctagttttcgtaattagcctttgtaaggtaaggtaatggtagactactacttgacccactctccattttctcacgctctgataccaatttgtggtatcccaggtcctcacacactggtgcacttacacaaatacacaaaaatttctctgatagaatacttttgatgtatttagataatggtctgtcaagccacaccacgttggccttttatataatatgctatttataatacgacgtgactcttcacttaggaacatgactcttcacatgagtaacttttttacctaaagacataactcttcacatatctaatttattattattaaagtttaatccaacacgtttttcatcctacttctattctatggttttttttccccttatctttctccctttatttttcattataacatttattacatccttatttgttattttttattattattcttttctcttcaccgtacaccaaaacaagaaagcaatgattcaacatttatcataacagagtaagaattgtgcccgagggagataatgcattttgcatttatatgggcaacaattaaagtggctgagttatgcataataagagctcaatatgaaatggattgttttcagctttgtcaggcgtggaagaagcatatttctttttgtttttcttttttcttaatattaggtataagaagaagcctatttcatagtctggtagaggatgtgagaagaattagttctaatgcttcaaggcaagaattgctatttacaaaacagaaaaggcaagctgtccgttgtttagctttatttatttgatggatgttggattcaagaggaggtcccatttcagttggaccaattcatgagcaatgatgtctcttctctatttcatcaataatatttgagcatcttgaatttgaaaaaaattctgctttcaccgttttctggaagcacgattttaatgtaaagaatgattgatgtaccaaatgtgtgttacatactgagaaataatttattatgttgaaaaataattaattatttctaagttcctataagaaaaataataataataataataataataattaagatttacttaaattacttttaagattctatgaggaaaaataaaatcaattatattgaaaatataatttgaatttgaattattgtttctcttagatagaaatatgttgttaaaataatttagataagaagaagtttgaattattgtttcttaatattgtacttaatttgttaacattatttgtataaatatacttatttaagatgtgaaatatgagtgaatgaataagtgaataagtaaatgaagaaatagatgaataaatgaataagaaattatttttacaaattcaattaatttatatcctgtgacaagctctccgatatacataaacttcaactttaagcccaatttcatgtgtgatccgtgttaaatctgactagattctctccatgaatcaaccaaaagaaaaaaactcagctccataaaaagtataaatctatgtttaaagtttcttcaaacatcaagatcatcccaattacattattggggtccccaagttagacttgactttctttgtgagtttatgttgctcttctttctaagtcttggacatcttctgtttcctggcacatttttcttacgttgaaaaacacaaataagtaagtgcaatcatactacttctcaactaaaaatgtcaaaacatgaatcacatgaaagtgtagacaattgggttattttcttacaaaaatttattaagttaattaatgcattaaaacatctaaaatataattggaataattggtttctagagttatgctcttaaacccatgcatgcctagtacaattgttacaacaataatcatataactatgcggtattacatgatttcttacaaagcagaaagacaaaaatgcttacaatgcaaaataaatccaagttcaattattttagagttattcaattgtaataacaggaaatggacccattaaaggtgatattggcatcacaattcacaaacacctgacatacatgtttcacagtaggacgagattgtggactttcactcaagcaagcaaatattacttttgcaactactatcaaccacgaagctattggcttcattggaagcggaagttttgggtccaacacactcttcaataacaaattagatgctgatggcgttgttgacaatgaaaacaatgaagagatgagatcaccaggatgctttcccacgattattttcaaagaaaggactccaaaactaaaggcatcacatttctcattcacttccatagtataagcaagctctacattaaattaaaatatgaaaataaaattgctcgtatagaagtagaaacaagagtgtgtaagattaataaatgccctcaaaaagagttaccggctattagactatggcaccttttccagagtcggaaaagggtaggtcattacagttttgatgaaacctatgtatgtttactgtggcaatactaataactaaaaatagctttccaaattccaattgtactcattcactgacctttattattgcttgtaaataacttcattatagtctataacacgtactgctgtcttatactcatcctttttctttaatcttaagcatacatacaaaaagaagtgttggaaaatttgaggatcaagccaaaaccaatgtaaatttctttcattatatataaaaagaaacattattccagcaaacgcaacttaattttgatctgtttgacatctcaactgctggataatttatcataagagtcattgcaaagttcactaaactcaaaaaaaaatcttggatatctcggcatcttcttggtcaatacttgatgaatgatgacaattcctcactaatataaaagaaatgaaatgagtgataaattagtgataaattggccaatgtaaacctgaggaattgtttcggtttagttggtagctgggatacaaatgaaatgagtgataaattaggaatataaaagaaaataataaaaaatgaaactgaagtaaaacatgactattcttataatcttgatgtttaaattgttgttaagagaggtgttaatgtttgaataaaaatcaagctttgcgatatcaaattatttaaatatatttaattatttccctaatatatatatatatatatattaatgttaagtatcaatgttatattttatctactctttagttttaatagtagttttatgtagttttaagtatgtagcctagcttttagcactctatatatataaacagtgtgaaaactataatcatgtgatttgacgttcataatgatgttgttaatgggccaagtagggaagtggtcgttgttccacatttatatgcttgttttacgatattcttctctaatttaggttggtatggacaaatcaaattaacatatgttaaaacatatattgaagtaatgcatttgatgtatcttattttaatttcagatttttgaaggatttatttataaaaaaaacataaagtcaatcactaaaatcccaaataagtaagtgcaatcatgctatttgtaatctaacatcgtcatttgtcatcgcgtcatgagaataagatggggtttctgaggtgacccttcattctctcttttctcttcatttctcttctctttctatgttcttctccccccattcttcattttcgttttttttttttgtttttgatttcttttggtttgtataatttctccttctttccattgtttctacatggccattgatctgttgtaaccagtggcggaaccagaaatttttttgagggggggcgaacataaaaaaaaattatatcataaataaaagtactttgaagacaatacaaatctaatatacaaaaaaatgcaaaacgcaaaccacagacagacaaattgcaaacatgatggattgatgaacaagctgacaaagtctagtgagtcttaataaaataattcataatttaaaatcaaaatccaagtaacaatatggagataagagataaagaagatacaatcagttttagcttaaaaaacttaattggataaaaaattacaacatccaaattggataatcaatccaatggacaacttcactatgataataaataagtacctttaaaattctgatggagagttaagaatcagacttgtcaaacgcttctatatgatctcataacaattctctcaatgatgcaaacataaactctctaaagctctaatattatttggaatggaatgcatacaattaatataaaaatatgtttctatttatactaatttaagcatacgattttaaacaatttttgaatgcaatcctaaaaatattttatcatattatacaatgcaatcttaaatatattttatattatgcaatacaatcttaaaaatattatatcctatttttgaatataatattaaaaaatattctatactatatttgaatgcaatcttaaaaaatattttatcttattatgcaatgtaatcttaaagatttatattatattatgtaatgcaatctcaaaaatattttatcctattttttaatgtaatattaaaaaatattatatcctattatattatacaatataacttttttattattaaattattttttaatttttaatatatatatatatatataattttatattagtaaaattttagggggggcgggtgccctccctagccccccctgtttccgcccctggttgtaaccttattacttcttttatcttcttccatagattttttttttccgtccaccatcgtgccaccaccgtcgcgaatcaccaccacgccaacaccgtaccactgcaccgccaccacatttcggcctcaccatggtggccaccgcaccattggcccctatggtggtgacctgaaaaggtcacaaagcctccaaccttattttcgcgcagctactctgcccatcaccaaaacacgggttgggctgggtagccctgacctgatcctaaaaaaagcttttactatttgcaccctagcttctcttaaatacacccctgaaaccaaataaataatgctttctgcacatccagattttcataagcacacccaaacatataatgctgtttgcacctttcttttcataatcgcacacccaggcccattctagaaaacatttattattgtttgcacctctttttttataattacacatcccttattgttgggcctgatccactttaaatacaacatgaaatgctatttacacctatctttctcataattgcacaccccttttaggttgggcttggcccacttgaaaacataacgtgtaatgctattcacaccttccatattcataaatgcatcactaatctgttgggtccgacccattttgtaatttaacaatttcttcttattgcactccctgtcttattgtacgctcccctaattactaagtgtactccttacttctattatatccacttctatttccattttaatttatctgataacgtaatgttatgtcaattattcattttttttatatagtacgcgcttatgtttcgtgcactccatgctgggtctctgactcgcttggtagtgtttcaataacacgtggatagatttgtgaatatcatgctggatctccgacttgcttgatttcatagagtttaccgcaaattcaaaatattttctaaaaatagataaaaaaaatactcaaataaatgatcactcaattctcctttttctcaaaaattacattttacttgagatcgcttcaaggtccaatgccttaagcgattctcttagctccctttcaaaattcaacgtcgcttcagggttcaatgccttaagcgattctttccgctttttccttaaaattcaatgtcatttcaaggttcaacgccttaacaatttttttttcatgcaattgaaacaaatctttttggaaaaaataaaatcaattcaatcaagttgttttttaaaaaaaaaagaactacgtaagtttgatttcttcattgtacttggggatacgtacaaacccctcgtcgacctaaaagataatatatatatatatatatatatatatataatcttctcttttctaaaaaataaaaatttgattttcttttctaaataaacaaaaataaaacaagcatagtcatgatcttaagaaaaaacaaataattaaaaagtcactttatgtttaacacactcgattaaagactgttgtattcgtgatggacgcgtggggtgttaacaccatccctgtgcataaatgactcccgaatctttttttctctaaaatcgtagactataccttatcttttagtttttccgacgttttccttaaataaacgttggtgacgactctcctctaattttctttttttttttgggaatctttctaatcttcttttttcatagccttccctgtcgtggctgaataggttgcgacaaggaaaaaatgcagtgacctgctcattggtgcctacaaaggaggttaaattgcatgaatcagtattcagaattttagcagttccaaagtcagagatgcgagctttgtattccaagtctataagaacattcctgcttgatatgccacgatgaagtataggaggagagcaactatgttgcatatgctatagagcactttacacacctttaactacattcaccctgctattccagtcaaacattattgcttttgcatcatcctttagtactttatccaagcttcccccttcaagtaactcagagactagaaacgagaatcgtggatctgaacaaaacccttttaaattcacaatgttatgatgtttgatttgtgttaaggcttgaactttgcttgtaaaacattttaaattgagcatttccctatccactgcagcatgaaattttttcacaggaacgacatggccagatgataaactagccttgtaaacagctccagaatctcctcctccgatgagataaatatcatcaaactcctttgtggattcaatgatattttgagacactgttttttcatcataacccaatatggaaaaataatcttgagtttgttcttttatagcctgtttttctgattttcttgctccctggtgatgaataagacataatgaacctccaaccacgaccacaactagaaataaagcacccgaggtcaagtaaatcgccaacatgatgacatttttccttttactgtcattgttgtgactcaactgttggcaaggtgtcaagcccgagatattacttcacaagtctttattgttttccaatgcttcagatggagctttaagaaaggctggaatatcaggaattggaccctctaattagttgttagatatgtcaacatttgtcaaactcaacaaattcttaaaattggatggaatggtgccagagattattgtgtgagagattcaaattttccaatctgtgcaactttccaagtgatatggtattttgccatttaacttgagcagtcgtccaagttgatttggaattggaccagttagactatttgctgcaagcttcaaacgttgaaggtttagcaaagatcccatttctgtgggatgtagtcagaaaattcattgtgactcagagagttcaaacaacagggtcaatttaccaaaattctttggactttttccacttatattagttgaagaaagttgaagttgttgtaatttgggtgcctggccgagctctggcggtttaccaccggataagttgttgctacatattttaaggcttgttagactatggcaattggcccaaattggtgaaatgtgaccataaaaattattccttgtcagatcattgttgttcaaatgtggatatacaccaaactcgtcggatatatttcctgtcaagtggttgtctccaagtatgaatctgacaagggtggaacaattcttcaagcttgttggaactggacctgtgaaaagattagtggtagcaggaaaaaatttcagcaccttccgaggcaaatatattgtggaaaagagccagagaaatcatttaaactcagttgtaagcttaaaaaattggtaaagttgttcattgctggtggtaaccattaaggttgttgggaatgaatagttccagaaagttggttttctgagaggcgaagcctctgtaaattgaccaagtttcctatggaaacaggaattgtcccagaaagatggttttgctttagggccaattcagtgagtttgtcaaatttccaaagagtggaagcaattgatcaaacaagtttattaccactgagcataagtgtgtgctcaaagtggccaagtctcctatggaagatgggattgggcaagacaaattattgttcaacaatttgattgctttgggagaataatgttttccaaactcctcaggaatggggccagagagatggttgttaaacaggacaagatgtattaagtttctcaagttcctaagtgaagggatggcaccgagagattattagttgacaaatcaagtgtttgttgccagctaaatctagctatgataagttggcttgctttgctatggaaactggaattgacccatttagcttacatttggagatgtcaaggtgactctgacctctcagtgccccctatttcttgagggatggaaccactaaaattacttttatccattttcaattgagaaactctggacaactgaccattatcgtggggaatatgcccatgtaaggacttgaaacttacatccagattgaacaagttaagaaaggatgacaagttgagattgagaagagttccttgtaacccaattttttttgaacatttattgtcgtccaacacatccttcaataacaaaatagatgctgatggtgttgttgacaatgaaaacaacgaagaaatgagatcagcaagatgctttcccaggattatttccaaagaaaggacaccaaaacaaaagagcaacacatcaagtttctcattcgcttccatagtataaacaagctccacaataaattaaaatatgaaaataaaatttactcatatagtaactgaaacaagagtatatggtatataagattgatgtcttaagagcaacaatgaagtgcctaacctggtgcagcatacctataggtgcctacaactacaaaggaggttaaattgcgtgagtcagtattcagaattttagcatttccaaagtcagagaagcgagcttcatattccaagactataagaacattcttgcttgaaatgtcacgatgaagtataggcggagagaaaccgtgatgcatatggtatagagcactttccacaccttaaactacattcagcctcctattccaatcaaacattattgctttatcatcctctaaggctttgtttgggagttaggaggggaaggaaaggaaagagattcaagaggaatggaggagaaggaaagggaggaaaatgagggaagttccttcctccttgtttgagagttaaaaatatattaagagaggaaaattgagagttaataagatattaaatatgaaaattatataatttaaatataaaaatatattaaaaatatattttaatatattttggaatttatagttggggtagaatagtaattttaattacttttccttctaaaaaccccccaaggggaacaacaatttttaagctttggaggattttggaggagttttaaaaatcctcaaatcctttccctcaaaaattaaaactcccaaacaaggagatgacaccatctaaacctttcatttcccttccttccccttcaaaatccctctcccaaacaaagcattagtaatttgtccaaactctcccattcaaggaactcagaccagaaacgaaaagcatgtatgtgaacataacccttttaacttcacaatgtgaacaaaaataacttttaccggtaattgttataccatttaccggcaatataaatgccctcaaaaagagttaccggctattagactatgttaccttttccagagtcggaaaagggtttaccgccattataatgaatgctggtaaaggccattaccgttttggtgaaacctatgtatgtttactggcaatactaacaagtaataactaaaaatagctttccaaattccaattgtactcattcattgtcctttattattgcttgtaaataactttattatagtccataaaaagtactgctgtcttatactcattttttttctttattcttaagcatacatatataaagaagtgttggaaaatttgaggatcaagcgaaaaccaatgtaaatttctttcattttatataaaaaagacattatttcagcaaacaccacttaattttgatctgtttgacatctcaactgcaggataatttatcataagagtcattgcaaagttcactaaactcaaaaaaatcttggatatctcggcatcttcttggtcaatacttgatgaatgatgacaattcctcactaaagaactcttgcaatccattaatcaaatttagattgaaggatttccctgttatgcgacaaaagttataactttagggaatcatatcaatagagtatactgtgatgcatgtcatcttgaccaacctgtttaaatacaacaaaactatctatataaatggaaaggtgaaagaatagtagttcatggagtttaaacacattattctccaaaattatttgtttcaacaatattaacatgtaaataaataagaacttaaaagttatgattgactttaagccataattaggaaaacgagtaaacaaaacaactggtaggcaaaatatgaggaatttcaaaattgatagggaaaaaaacagcttacgtctggtgccccaaacatcaaattaggaggaatttacacctcagtaaattcttgattaataataccacgattcttgcctcaaaattgcacacgaaacacctgaaaattagtccctcctcattcgtaaaaagggaagagatgcaaaagaacaaccaaacagtaaaacatttgttcaaagcctataaattttcagaacgttccaaaacacatgaataataataataataaatgcacattcaccacagaaaaagtatagtagttgaagtgtgaaatgtcactaaattgattctctttcaccagaaccacatatggattaatatcatttagtactatctaaatgtattttcctttacctatcatcatgaatgaaaaatatcaatgttatcttttatcttctcttccgttttaatagtagttttatgtagttttagagtagcctagcttttagcactctataacatggagtgtggactgcaatatacatggtgcgccagcttcttcaatctttcgcactcagcaaattgctaacttgtccagactttctcaattgataacgaatactaataattttagtggctcaatccccacttccatgatgaagttggctagcttgtcaattctaaacttggaaaacaataacctttcgggctctattcctgaggagattggagaattgcagaacttgaagcgtctaatacttcaagggaatcgactttctggtaccattcctccaacaattggaaggttgtccaaccttgttagacttgaattgtccaaaaactctgtctcgggtacaatccccacttcaattacaaacttgacaaatttagaactccttcagctctcaaacaatagtctttctggctccattccatcctccataggagacttggtcaatttgattgtttttgaaatcgatcaaaataaaatttcaggattaattccttccagtattggaaacttgacaaagctggtcaatatgtccattggcgataacatgatttctggatcaattcccagctccatcggaaacttggtcaatctaatgctcttagacctttctgtaaacaatatttccggagttattccttccacctttggaaatttgacaaagctcacctatttagtagtgttaaataacacatttcatggtagattaccacccgcaatgaataacctcaccaatttcataagtttacaactatctagaaacagtttcactggccctttgccgcaacaaatttgccttggtggttctcttagcagatttgccgctaactataattatttcacgggtccagttccaaaaagcctgaaaaactgctccagtctttacagactcagactagatggaaaccagttgaccggaaatatatcagatgcttttggtgtatatccagagttgaactacgttgatctgagtagcaatcacttttatggccacatttcaccaaactgggcaaagtgtcctgttctcacaagccttatgatgtccaacaacaatttatctggtggtatacccccagaactcggccaggcacccagcttacaagtactagtcttgtcttcaaatcatctaacaggaaaaattccagaagaacttatgaacttaaccactttgtttaagttatcaataggcgacaatgaactttctggcaacattcctgcagaagtaggagccttgtccggccttacaagtctcgagcttgcagcaaataatttgggtggcccggttccaaaacaggtgggagagttgcgtaagttactttacttgaacttgagcaagaatgaattcacagaaagcattccttcagagtttaaccaactgcaatctcttcaagatcttgaccttagtaggaatttgttaaacggaaaaataccagcagaacttgcaactttgcaaagattggaaacactaaacctctcacacaacaatctctcaggagccattcctgattttaagaatagcttggcaaatgttgacatatctaacaaccaattggagggttcaattcctaacattccagcctttcttaatgcttcatttgatgcattgaaaaataataaaggcttgtgtggaaatgcctccagtttggtgccttgccacaccccacctcatggtaaaatgaaaagaaatgtggccaatttggcattattccttactttgggttctctaattctagtatcattcgtggttggagtttcgttatgcatttgctatcgaagagcaagaaagggcaaatcggaggaggctaaagaagaaagaagtcaggatcattactccatatggagttatgatggaaaattagtgtatgaagatatcatggaagccacagaggggtttgatgacaaatatctcattggagaaggagggtctgcatctgtttataaggcaatattacccacagaacatattgttgctgtgaaaaaagttcatgcttcgaccaacgaggaaacacccaatttaagagcttttataaatgaggttaaagccttggcagaaatcaagcatcgtaacattgtgaagtcacttggatattgtttacatccacgcttctcctttttggtttacgagttcctagaggggggtagcttggataaagtactaaacaatgatacacatgcaacaatatttgattggaacagaagggtgaaggttattaaaggtgtggcaaatgctttgtaccatatgcatcatggatgctttcctcctattgttcatcgtgacatatcaagcaagaatgttcttatagacttggattatgaagcccacatttgtgactttggaacagctaaaattctgaatcctgattcacaaaatttaaccgcatttgcaggcacctatggatatgctgcaccaggttaggaccttttttttttttttttaagaagttaatcctatacatacttgtttcaataataagtcatgctacttcttgtgtaaatcattttcatattttgatattttacagagctttcttatactatggaagtgaatgagaaatgtgatgtttttagttttggagtgctttgtttggaaataatgatgggaaaacatccaggagatctgatttcttcattattatcaccctctgcgatgtcatcagtgtccaatttgctgttaaaggatgtgttggaccaacgactacctgatccagtgaagccagttgttaaggaggtgatcttgattgcaaatataacattagcttgcttacgtgaaagtccacattttcgccctagcatggaacaagtgtataacgagtttgtgatgccaacatcatcttcagtgaatttattctccatgatcacacttggtcaactcagagataattgaaccttgttttatggtgtattgtaagctttttgttatattaatgtttgttgtgtgtgttttacatgtttcttctattttgtcagaactggaaaatattgcaaaactgtcttatgtctttaagtaagaccctgagtctttattttgtaggttgaataaatacggtctagttttaaagggagacagcagtgatgtctttaagtaattaaggatattttgactatatatttcaacattaacgtgccacttgaactctgttccaattcatgatacatagtctaaataccatttaggacgatggccaatttgcaatagtgatttttattaaaatctattgttcaaaatatccttatgcgaattttcttgcagattaaccatagatctaagtgatattcaaaatacagttgctacaaaggaagcagtttgggattttagcgcagctagtcatcactcatcagtacggcgtctaatttcattttttttattttctaatcaaatctaactagcatgggattttagcgattgactttattttatttatgtttaaataaatccttcaaaaatctgaaattaaaatcagctaaatcaaatgcattacttcaatatatgcttccttgattccgatcaggtagagcactcttgcacgcggcccaatttgaacgtaattaattatagtgccagctgttagattaattgaaaatatatactatgattattatctcaaactcactcaaaaaattgaaccaagttgccaacagtggtccagaagcgaggaggaaaaacaaaaaaaatctggacctctcgactttgaaaattcaagaaaaccttatctacccttatcctaaacaagatcgcatgttggtatcttgattggaaaaacttgtattgaatggcaaagtatatgataatttcgtttctattatatattatgtatcatgtttgatttgtggaccttacaaatacacaagtcttttcacaccacgtggtgggaatgttaatttgatttgtatatataccaacctaaattagacaagacacaagagtatcataaaacaagcatataaatgtggaacaactaccacttccctacttggcccattaacaatatcattatgaacctcaaatcacatgattatagtttgagtaaattatattcacatgtcattgtgtttttttattaaattgtattcgatattctttttttattatatattacttttatcccattttgttaacatcgttaaaaagtcaattgacataattgaatagacaaaattgctcattagagtaaattacacttgcacccttgtatttttttttttcaaattgtaggtactcctccttttttatacattattgatatcgatggacgcgttaagactgttgatgtcattggccctgacgatgtcgatgttcagggaaccagacaaagcggtgatggtggtcgaaactacgacaggggacgaagaggtgatggaggtggatatggcggtgattacggtggaggtggtggctacggtggtggtcgttgctcatacgggagtggatggggacgacaataaggaggaagagatgatgttgtcgtgggagagagaggaggaggagaagaaggtggtggtggtaagtaaagaaggattgtggaagaaaaagagggtttataaaacccaatatttgattttaggaaagaagataaagttatattaattgtgtttaagaaggagaaagtttgggtgtaatataaactaaacaattaaaagaattttttgtaggatgcaaaaaaggaaaaatatactaagtataatttactcttataattttcacactatttaaattgatggaccgggttaaagtcttgggcaatttcaatgtaaataactgatttgtgctttcctagtgatgccgcctgcagctaaggttttaacttgtggtcatgattagcgttgcgttttcattataatctttgtaatgtgcaaaattgcagataatacacaattaatgcagcctgagttaatgtaatggtagagatctcaatttttttgacgttgcatataaataatttttttttttaaaaccttggatgcagcaagaagtacatatatgccatacatgtagttaatacttaatactttgtttcttgaagcattcttgagggaggaagaaactagccaagttctaaaatgagaaattaagctggagtaacaaacaaacaaaaaagatataatgttgtgataccctggcgacaaattattagcacagtgccaaagattgaagaagctggcgcaccatgtatattgcagtccacactccatgttatagagtgctaaaagctaggctactctaaaactacataaaactactattaaaacggaagagaagataaaagataacattgatattattaaaaaatattaataataatttttatacttaatcaaatagaaatgaaaataatcatagaactaatagaaatcattaaaattagaaaaatattaatatgagttttttttaatcaaaaaatattatttttggcaaaaaaaactgtttttgacaaaaaaaagaaagtaaaaactcactttgtggcggttttcaaaccgccacaaatagaaaagtgaaaaaataaaaaagtaacatttgtggcggcttttagccgccacaatgtttttgacgactttaccagcgttcaactaaaaatcgccacaaaattttctgacatggttacttctgacagtcaatcctgatcgtcagaaattaattttgtggcggtttttagccgtcagaaaacgcttttttagccgccacaaaaatatcatttttttgtagtgagctttaaagtaacttaaaaactagtaaaaaattataattttttcaagaatcttaccaaacataagatctcgtgaaaaaaatatcataaaaaagttaaaagaattaaaattttgatacaaaaccaaaagactaaaaaaagtattactttggaatttagagggtatttttactttacttttactaaaacaaattaaataattctcaccataaaattaattcaaatacacgatactcatgtccacgtagaattctattgattaaccatatacatatctggtagatcaaaaataaaatatgtatacatcatatactttgcttaattataattttattttgagttaaaaaaaataaattttatctcaaattcattttcttttgctaaacactctagatttttttctttttagtgaccaccaccactgctacctaccataacaacagagaatatatgaatgcttgacctctcttcctacgacccttctccatctccaatcacaatcacatccaatttatgtatcgtctctgttttttaggagagaaaagataaagttattccaaagataatcataagtcaatgactaattgactatggccacatcaccgttcaaaaaagaggaaatttgctaagttgattttcaatataagatgtttgatgaattttttaagataaaaaataatttcttattttttgtagttagagaaaatccaattaatattgtagattttttaaatttaaatctaagtattttatataaataatttatttaacaaattcttaaaaataaaaaataattgaatatgctctaagtttctcttccatattcactcgggtaacgaaaatgctgcatgttttagccactttgttcatgtacgtgggggaataacactttttttttttggtggaaaaagattaggctccgtaaaaagcgaaacagggcaacagccatctattaaagcacctccaagtccatccgaggtgctgatgtggtgaaacttaaaaaggaagagaaataaatagttagaaaaaaaaaaagtaacttgttcaaagaaataaaaagaaaaaattcaacataacattgatttaaataatattatatttgattttctaaataagatttcagatttaatataatgattagtaacctaaaaaagaagataaataaaataaatgaatagttatttttttatttctctgaaatcaaatacttttatttttatcgtatttctcacttattttatcaaacacctcacttacatatatttttcttcttctattaagcacatcctaagaaatgcttattggaacaggttcttggtaaatattcttaaagtagcatatgcttataagaacatcaatttttaaaagttttgtgggtgttatgttcatatagctttatgaacaataaattatttttctccatttcataactattgttattttagctttttttattttaacattgttgatgctttaaaatttttaagtcttgttaattattttttcatatatacttctatttaaaataactatatttattcttaaatttactatatatacttgcagtgaatatttaaaattgtattgctgaagagaagatagtggatatttaataactaaatgacaaatttgaacatgaattaagagtaaaattcaattacattaccatctagttgtgcgagtctatcaacccttagtttagaaagatctagaattatattaaaagaaaaagaaacaagcaaaagggtagaaattatccctttctttataaattggagatgaataaaagaattcttccaagaccttacattgtcaagccttatccctttattcttgttcagggttttctacgtatgtccctctcagtttattatgaaaaaaaatcataggcttaaatacttgtttggtatttataatttagttatttttttcatttttatattggtattttttttttgttttagtccttttaaagtatgtttattttatttttcatctttaaaatgctttagattgtaatttgaacaataaaataaatattttgagcaataaaaaatattacttaaaatgttttaagaaaaaaatattttataaaaaaatcatttttttacaagaacgaaaaagaaaaaaataaattataaaaacagttgacatattttataatataaatgatatgttgagatgctaatgattgatttaaaataaattatctttcttcactttaagaaaagtgcattatcactatgaaaaaagttgccagcaataaaggaaactcagaataaagtaaggaaaagtgtgtttggaaacgagacaaaggcattataggtgcttttcttccctttgtctcaaacttgatacttttatcattattatttttaatgtgtagagtgccgataaatttgtttataaaaaataaaaattttaattttaatttatgaaagtgaaaaaaatatgataaatttatcaatatattaattttcatctgttatcgttaatgaatgagattatgtgttacatttaggaaataatttgtcaatattttacacattcatggatgaaagtgactatttattcaaaatataatttaatatccatctttctccattttttaatcattgtaaacataatattataataaatacttacaaaaatacaaaaacaaacgtaaattaaaacaaatataataataaatataatattaattaataaatataatctattcattaatatgagaattctaatgagaatcaaacaaaaatattaagttaatccttatatataccatccccttgaccccatatatattccatttctaactcaggcaacaacgtatataatttcatgttacaatgtatgattatatatatatgttacctgaatccagaaacaaccagcgtcgaaggggccaaagtttcacgtgaaatttaaatgtacaaattcgtcaaattgtatagtgcggaccgcaatatatatgcatgatgtatttttggacacactgtcacaaaatttgtcgacagggtatctaacattttagaattttgctagttcattcccctctcactcaatgttggataatgttccgtttaatgcttggcctaaatccctaggtgttgacaaaggaaatattgacttgggcccaattcccgatggttgacctcggtccatttttcccatttagggtgctgaaatccctaaacctaattctctctatggaggcaagaggaccagcactaacgacagagagccagtgacgtgagagtacagaacacaacagtggtgaggaagagtgtctccgagaggttgagagtaactcttgttgagggtgtgtgttcaccattgttgagtgactccggcgtgaagctgttgagtatttgtaaccattattattgagaatagtggattgttctggactagatcccgtgggtttttcctcttggaggttttctcccacgtaaagctatcttgtgttgttgttctctccctttatctctcgcgcatccttcgtttgatcgtttcatgtttccgcgcttttgttttactgtttgattggttgagagttgagtccagtgactcctcagtgttcgtggttggttgtggttggttgagacaattcctagccgagaaggaggttgtggtgatcggggtgaccgagaaaaaaccacaacactcaagaaacaaagtactaactacatggcatatcagtcccaatttctacatggtatctgctagcattaaataagttttttcaatgcatgaatcattaaatcaaagaatcttgttaatttgatggttgaaactattaatattttatgcagtaattaatgtattttcagactaaagtacaaccacctataccttttggagtgtcttaagctttgtatttatgttggacaggtggctcattaacctgttaggtagtagaaatctgctgtgctattttgtcagtcagtatatggatcagaaacataacatattgctgctgtatgaatgaaatacctctcacggttcttatttcatagaaacttcttgtaccagcaaaactattatgttacatacctctgtaactagtttttgtgaaaagcagtagattcggcaataatcaattaccatttaacataattggttgctttgcttggatactagtttctaaatactcgttcagtaataattgattacttgtcatattaattgattacattgatctgaatgtgaaccaagatgttttgttggatagtttaattgatttaattgaagcaataatcgattacattagttacagaactaatggaataacaaggttgaactcttttacaaacggaaaactcttcaagaaaatattttttaggactatatatggctaaatatatctgcaagaaagctcgtatatggatattttgaagaatatatgtattagacaaatggtaatgaatccaaagaaagggagaactgaatttctaaaaatcagtcccaaaactattttcttgaaaacttatagacacaatttgataatgtaattgtgtaattgagatgtagagagtatagccaatgtaaatctaatgcaatctatatgattctaacacgattacagcatatagaaatcaagaaacattatttataacaacaacacagtgagttgaggaataaagagaatgtgagacacagtcacacagatgttattctgttttgatcattactgatctacattcagtctccggtaaaccttgctgagattattcactagttaaagcaataaaaaagcttacaacaggcaggaaacaagaaggttcaattatctacgagttgaccaagtgtgaccatggagaataaattcactgaagatgatgttggcatcacaaactcgttatacacttgttccatgcttgggcgaaaacgtggactttcacttaagcaagcaaatgttatttttgctatcaagatcacctccttgtcaactggcttcactggttgaggtattcgttggtccaacacatcctttaacagcaaattagaagctgatgacgttccagtggatgtaaaaaatgaagaaatgagatctcctggatgcttccccatcattatttccaaacaaagaactccgaaactgaagacatcacatttctcgttcacttccatagtataagcaagctctgtaatatatcaaattaaatatgaaaatagtatcatacaacaagtggcagcacttattattgaaacaagtatagttttgatttcttaataacaaaaaggacctaacctggtgcagcatacccataggtgcctgcaaacgaggttaaattttgtgaatcgggcttcagaattttagctgttccaaagtcagagactcgggcttcataatccaaatctataagaatattcttgcttgatatgtcacgatgaacaatagaaggaaagcaaccatgatgcatatggtacaaagcacttgccacacctttaacaaccttcaccctcctttcccaatcaaagagtgttgcatgcgtatcattgtttagtactttatccaagctacctccctctaggaactcataaaccaaaaaggagaagtgaggatgtaaacaatatccaattaacttcacaatgttacgatgcttgatttctgccgaggcttgaacctcacttgtaaaagctcttaggttgagtgtttcctcgttgggtacagcatgtagttttttcacagcaacaatttgtcctgtggataaatttgccttataaacagatgcagacccaccttctccaatgagatatttgtcatcaaacccctctgtggcttcaatgatactttcatacactaattttccatcataactccaaatggaaaaaaaatccttggtttgttcttctttagcctcctcctttttggcctttgttgctctttgataataaatgcataatgaaattccaaccaccaataataatagaaatagagcgccgaaagaaaggagtaatgccagcatgatgacatttcttttcattttatcatgaggtagggggtggcaaggcaccaaaccggaggcatttccacacaagcctttattatttttcaatgcatcaaatgaagcattaagaaatgcgggaatgttaggaattgaaccctccaattggttgttagatatgtcaacatttgccaagctattcttaaaatcaggaatggctccagagagattgttgtgtgagaggtttagggtttccaatctttgcaaagttgcaagttctgctggtacttttccattgaacaaattcctactaaggtcaagatcttgaagagattgcaattggttaaacgaaggaatgctttctgtgaatttgttgttgctcaagttcaagtgaactaatttgagtaaagatcccacctgttttggaattgggccacctaaattatttgctgcaagctccaaattttcgaggcgggacaaagaacctatttcggtaggaatgttcccaaaaagttcattgtcgcctattgatagatcaaacaaagaggtcaagttcccaagttcttttggaatttttcctgttagatgatttgaagacaagacaagttcctctaacatgggtgcccagcctagttctggtggtataccaccagataaattgttgttggatatcctaaggcttgtgagactaggacaccttgcccagtctggtgaaatgtggccataaaaattattgctactcagctcaacgaagtataactctggatacacaccaaaagcatctgagatatttccgctcaagcgatttcctgataggtttactctggtaagactggagcaatttttcaggctttttggaactggaccggtgaaagaattaccattagcagcaaattttctcagtgacccatctatgcaaatttgttgtggcaaaggaccggtgaaacgatttgtagatagttgtaagctttggagtttggtaaagttattcagtgctggtggtaatgtaccatgaagtttgttattaaacactagcaaaaaattgagctttgtcaaatttccaagggaagaaggaataactccggaaacagtattcctagacaggtccagcgactctagattgatcaagtttccaatggaggtgggaacggatccagagatcatgttatcggctaagtatacaatgccgagctttgtcaagtttccaatatttgaaggaattgatcctgaaattctattactttcaaaatcaagaaatttcaaattcaccaactctcctatgtagggtgggatgggaccagagagactattgtttgcgagcctaaggtgttctaaatttgtcaagtttctaattgatggaatggtaccagaaagtttattgcctgttaagtctagcaaagacaagctggccaacttcatcatggaaatggggatcgaaccatgaaaaagattagcatccattttcaactgagaaactctagacaagttagaaatttgctgaggaatgattccattaaaactgttgttactaatatccagagttagcagcttgagaaaagatgaaaatttgagactgtgaagagtaccttttagccccagatttgccacatttatagcggtcacatagttggattcgtcacaaacgattcctttccacgtgcaaggacttacagcactggaccatgatgacaaagaagcttggctttggttgtcaagactcactctccactcaagtagagcagctgcttccctctcatggttttcagcagtgatggcagcaaaggcaaaagaagtaaacttgaaaagttgggaggaatggaggcttaagagtgaacagagaattagacgaattaatgaaagcttagagaacatcatatttgagctattgggtgattatggaatagcagaagatgatggatcctcgatcagagctagtagatgatagtgtaatgaaatagcagaagatgatggatcctcgatcagaactagtagtctaatgaaatagcagaaaaaactgctcctgtttaatgtgaaagtacgtacctagcgtggcctcagaaaatacggattggatttattgggaaatttagaattattttttaataaaagtatttttcagaacttattatatacttttaataaaaaaattctccaaaccactaacttgtatataaaaagattcttaatcttattttaaactattagattaatttgatagttcagattttatcactttgttttgaaagatgttttttaatttgattactaatttaatttttatatcttgtatattttgaaatcataaaaatattgttgagggtgtagcttaaccactaactagtataaaattatttcaatttaatcaatagtcttttatattgtttagaaaattgtcagaaaatgtttgataaatataagactgttaaagatattactagcaacactgctataaaatatgacattttttttatccacaccattggtatgttttatcaaatgcaatcatgttgtgacagataaaattgttatagtttatagacaataaagttttttctcaaaatcatatgctaaattgaaagacctcgtaacaattaatccaaactcttagtagtattttttataggtttaaagtaaaaaaaatgttaaattaataactaaagtaaaaattaatttgttttaaaaatcttttaaaacaagccgtaaattttggatgataagattaatctaatggtcaaagtgacagtgacttttcctcctgtaatgttaatgcatgcaaataaataaataaaaaaacagttttggtccccacttgtaaattatagttatacattatgtttattagtcttttaaaaaagaaaaaagtgacattttttaatttgtataaatacaaattgaagaaaaaaaacattcatgtaaaatgttaacaaatatatttatgtaaataaaaattcttttgcagataaataaagatttgtgtaccatcaataaataagaaatcattcagtcaatttttttactcaaataatacaaaataaaaaataattacgtaaataataccccttcagattatttatacgtacttctagcaccattactgttcacttagagaacttgacctctcaaacccgatttctcacttgaattttatttatttattttattttgatgttgagaaattaattgggaaagtcattttatatatttattatttttttctggtttataaaaagaacaattcttgcctaaaagaagaccgattcattctaataaggtgtaaggtaaaaaatgaagtctgcactaatcaattttatgtcagctttcgtgatttagcgtccacttttggctaacattatactaagagtttcttgtatttgatattatcacagaatttggtgattaggaagataggattcacgatctcaaaattaggaaataaccgccatctagttcgagtttaaatcctattggcacctgaaaatgctcttttgaatggtttagtcatatgagatctctatgcagtcatctatgtaggagtacaaacatattccagctgctccaactgatattcaaatgcttgctattatcattttgtaattcaaattctgctgataaaatatgattatgtgaggacttgtttaaattcaaatctctttagtctttatttatttagttgtaacaaactctctgctgtactgttataaatacatatccctgataacctttgcaaatcaataaaactaagaaaaatctttcttggacacccattatgctacaagaaactcaaagagagaaaaaaaaaaaagaagaaaagtataggtattatatgatttatgatatgatagaaagagacaagataaataaaacatatggtgaaatgtttaaaataagtaaatatttgtatattattgttcacaacaaccagagcttatatggtaattctatattgtattagagcatatcttaatcaacctttttttttcttttttttttttccgacccacatggcctctcgaaccacctcttctaccacaactaacaatgcctgtaggctatgtagcacggatacggcaaaaaaagttttctcaacgtatcggacacccgtccgatacgggttcgcaagaaaaatgggattttacgtatcagaaggagaaggggtatttttgtaaataaaaaaaatcccaaaattggtgctctgcttcgatttgtgctacatagcttacctcttcgattttttttttgttcgtccattttgtgctcctccgccgctcccgccatagctgtcttccgcgtttgctgccgccgcgctgctcttcaatccactcttcaccgtgttcgctgccgccgcgctgctcctccgacacgcgactccttcgccacgctgctcctctgccgcgctcctccgccgtgctgtagctgctcttcctccttcgtcgtaagcccataacagcaagtgaagcttgtgaatttttttacctcatttttttcctcattcgctatagtctctagctgcttcattttattttacctcattaatttctaattaccacagctgcttataatttacatcatttatattaccattcaatttgtaactctctccctgttcaaatcattttattttagtagtttttttttctcagccctcaaattgtttgttattttaacatatctgtttttagcaatttaaaagcaaatattaatatttttaaatatgattatgttttgttaatttacatcatttacattctcctcaagttattttacattattttttctttctatttaaaagcaaatattatgtttttaaatatgattatattttgttttgttaacattatagaatgaagtcaaacataaatcattttttattagtagcactccatgtccacacattggttaagatatttatcaattttgtatgaataaaaatatagaatccctttttgcaattaccattaccatatttttatcaattttgtaagaaggagaagggcttacttattgctatcaatttccttttattatattttattaatatgaaatacactatatatataaaatattatttaatactaagacgtatcgggaacgtatcgaaatattagaatttttgaagaacgtatcgaagttccgtatcgagaacgtatcgaaaacgccgtatcggtatctgtgctacatagcctataggctcctctaactctaacatcattaagttcaaccttgcaccaacctgccaatcaaactttcagcagccatttatccgacatggcacaacttatgcacatcttgaaagccaacaagctggaaggagatgttacataaaccactccctgtcttccattcactattggatctggagactctgcggtcacaaatcctgaatatatgcattggtgtcaccaagatagccatttttcgcttgccttgctcggatcctgcagccccaaggctcaggttatcgtggcctcagccactaatctagaggtattctatgttcggaaccaaagtaactgaagatgaatgcatgactgcacgagataaaatagaaagaagagaaataaatggtgaaggcaaattgatagattggagcctaattaaaattgttcaatattatttagatatgggtctcaactctcaacaatgcctattagactttcaaagatacaggttccatacatgatagagtgtgcccattacaaacatagctccaatgcaacaaagttcaatacctcaaaatttttaacctacctattagtttagaaaaagtttcatacaacaggagtaggaaacacgcttatattacagcctaaaaacagaaaacgcaaacacactcaaatgacagtgataacataacaatgctgagagcaacttctaacttctaaggttacattacagcactacaacaggacaggttactctgtgcctgccatctgtccaagacaaattcccaaataattaaagtcaacgaacttggttgcacaagaaccttaatccccttcggccagtgagtattcacaacatacgtgcttggaagccctacatttgtaactgtacgagtaacattaatagtctttgagccaggatgatgcaccgtaattgaaggatagttgaaatcttcaattctgtaagaattggaacaactgtaaaggaatttcaaattggcaaacaacttgagtaaagcattgttgtaaccagaagcacataagaagttcaagtaatcggtggtgcgtaaatcgtaaacgagtccagggtcaattgcaaggttaggctgaatttgtccggcgccgtattcgaagggggttgctttcttatcaaatgcattccgagttggttgattcgtataatagtcatcctctctctctctctctctctctctctctctctctctcctctgtctttcattttcttccttttctctgtttctgtcattgatgaactagagaaacttcttaaacactcaaccgttgaccaaaacctttcacacccaacatgaaagttgaaaggaactactcaatgagctagatttcatcatcacttttctctgaaaatcatcaaacaaagagatccagttctctaggggaaattcacaaagtttgagtttggaagggaaagaaggcgattcaaggacgccaaagcttggagaagtgatcctccagccttcctcgactgtttagaggtaagaaacacaagttttaccgattgatttaggaatttgttcttggggtgaatagtgacccttttgtgatagggctagaattaggtttggattctttagaaaagtatgctcaggaggctgttctgatgaatattgaactttgaatcataactattgatgaagtttgattttgactctgagatatgtatgagtaggaagaatgttggttaaatggagggtattatgacatgtataagcctaggtgcttttacaaaatatgttcaggagaccatataaacggtgaaaaagtgttgaaataaccaatttgatgatattgataattgttgaaatatggtctggttaggtcatgaaattggtttatacagagttttagagtgactctagtgtttggtaagactgaaacagatcttgctgagggactgtgagtcgcctataaggtggatagttcagataaccttaagatagagaataaaaaggtgtaatggaaaggaatgacgtttcttttcattctaaacggttgagaaccattattgattggttgtttgtatgccttgtgtagggcgtaatacagacattgctggtggttgtgaccacgaagccgggagagccggtgtagcgctgagagcaggtaagctctttgttcttggtagtgtttcccattgtttgtgttccaccatactccgagggagtgatggttattgtatatcatgatgcatgtatattgaacttgtgtattactgttttatgataatatgtatatgatgagctgaacactgtgatagtgttatatatgtgattgatgagattctctggccagtagaattatgtttaatagactgtatataaaagtcctgatgtgagatgtgcccacatagttggatgaagcctcctcatgcaagaatgagagtcctgttgtgagatgtgcccacatagtagatgaagcctccatgtgagatgtgcccacatagtggatgaagcctcctcaggcattgatattattgtatatatatatgttatgtacatgtggtaatatggcttgatagctgtgattactagtttgaaatgtcaattttgatattatatgtcatggaagtgaaccagggggaggaaagacctccaaggaccctgagtttactgagatttttatctcaccccgtgtggggattatattgcaggtgtggcttatagccgtagtgatggataccatggtgggaagcccagtagagtcaagcattgtaagctgcttgggctagatattgagagttttggggctccctgtggtgtataccatattgagataggtggttctttttctcctgacatatctatatagatattgttgatgtctgccttgccttttgttatctggatcaataagggttagttgtagtggtgattcttctctatgattatgaatatgtaccatacataatgaatcaagaaatacggtttgaaaatgcttccgcagtttattaattaaagttttatggcgctattctgatataataataatgttaatacaccgggtgcacacggggtgttacaattcgtgttatctagtgttgtagctgaaataaataaaaagcatagttgttaattaataagccaccaatgtttttccaaatgatatgctacatacatatgatagtattttgtaattaagcatgcacatatattattatagctaataccaatgtacctgtggtcataattgctgatttgatagctcgactccaagtaggatttagtctctctttgtcattataggcactggcagatcctaggtacatgattgggggaagtgtcccccttaaattttcctattaaattatcaatatttttttatttttctattaaatacaaactagtctatgtgagtgtgttttttactggacatattatttttagtgctttatattacaaactaaattattgtgatttgtgaactgagatggaataattttagtgttttatttagtatttgtctgccgcaatttttagttttttagtgtttgatttagtactgtactattgtgctcaaatgagaaggtgactaagatgtagactagtagtacaaaatgaattgttttcattgttctatttaatctagaacaataatttggtctgactatttgtttgttcctttaaattattgtttataattgtttgttcctttaatttttttttacaaaaaaaaaaatttcttatgcagacataaataatttttcctgagttcaccactagtgtctcccttgattatttttctaaatccgcctctaataggcttagaaaaacaaaaggaaacaataattaataaaaaagaatggataaagaccggaaaacaaagggacataagtcaacttcttttgtgtgaatttttctttcatttgtgtcttaggtttctggctttagatgatttttctcttctctcttttttacaatcaaaactttacttaactatactttttttttatattggtgacacgctaagttcatattctcaatccatctttcaagtttttattatgtaattatacaaagaaaatacaactaatacactataaatcaactaattttagtatttattgaataaaaattcagaaaaaaaaaactaaatttatgtgtttaaataaaaaaaacattaaaaaagaatataactattatataattttaaaaaattattatgtaattcaaatgtataatttcaattattagtaccaatggtcataatagctgattttatagctgctggactccaagtaggatgatatgttttgagaagacccgtgatgccagctacatgaggccaaggcatagaagttccctgttgcacattgaaaagagatcgacgtctatctgatgcaatattagacggacctgctccttgtgttaaaagcagcaattatgttcacaacaggaacagttatgtctggctaaaaaaagaaacacattacggcaagtttatcttacatgagtcattaattgtaagaaggaaaatcatcatgtcatgttggtgtaacaaaatgtatgtagacctttagtatcaatggttgcacggaactgggacccctggatgagaatccagctattattggagctggctttactcctatatagctaacaacgactatgtttctggcaactgcatggaatgcccctatggatatcccatctgttaacaaagcttcagtatagggattagacgaaccgagagaggcagagatgaaatcaacaccatcatatatggcataatcaaatgcttgtagaatatctgcttcatggcaccctctggtatccagtttatgccagcacgctttgtaggccacaacgcgtgctcttggggagcctccctttgcagtaccatagtcgttagtccgttaccttcaacattatcaggaattggaccctctaattagttgttggtgtcaacatttgtcaaactcaacaaattcttaaaattggatggaatggtgccagagattcaaattttccaatctgtgcaactttccaagtgatctagtatttgtccatttaacaagttgccacaaagataatttattattgccaaattcaagttaattaattaacttgagcagtcgtccaagttgatttggaattggaccagttagactatttgctgcaagtttcaaatgttgaaggtttagcaaagatcccatttctgtgggaatgtagttagaaaattcattgtgactcaaagagagttcaaacaacagggtcaatttaccaaaactttgtggattttttccactaatattatttgaagagagttgaagttgttgtaatttgggtgcctggccgagctctggcggtttaccaccggataaattgttgctagacattttaaggcttgttagactatgacaattgacccaatttggtgaaatgttacatcaaaatctaactttactcgttcacaattttattcttttgttaaacatcctatttatgctttacggttcaattttaagtgagagtttgagataataatcacatgtttcaccggttgagaactaagagcagacttgttaattttcaatccaacaactctactattacttaataacattcaaatcggagacgaagtagtgctttacctgtttggaattaaggaggcatatgttgaagcaatgcatttgattagctgattattttgttttcagcttttatgaaggatttattttaaaaaaaaaataaagatgattgctttctttaaaaaagaaaaatcctaaaccagttagcttttatttgaatataatttttttgaaaaataaagaagtctccggtagcgtgtgaaaagtgtgcatcacatgccgtataaacaatttaacggcagttgctacacggataagatttttagggtgaattgctatccatataagaatcaattatcgacttcaatgaattaatattcatatactaagttttttttttatatattttttcatttttatagaaaatatagaaaacatattaaaaatacttttatttttaaacaattaaattaaaaagatatttacaattttttaaaaaagataaacaaaaaaaataaaatactaaatttaaaaaatgtaaaaatataaaatagaagtcgtacataattttacgacttctaaaaagaaaaaaaatcatataacttcaaagtcgtaattcttaaaacaatatttaacttaagttcgtaaaaaaaattataacttcaattttaaaagtaaaaaaaatacataattttaaaattgtaaattaaaaaaaaaattaaactgaagtcgtaaatttttttatgacttcagttaaaaaaattataagtcgtaacattaattatgatttctgattcaaaagtcgtaataactttatgacttatccctttagaaaaattatttgaaatccatctagaaatgataataaatgaaataaaatatctccaaataataaaaccctcgcccgcgagaacttgagttttctcaagcgttcggaacttgcattacaaggttccctccaaagatttagggacatgtttcagtgcaaataaataattaagagtgacatagttacatgttttatagtagaaaatctatcagaaaattgaatcaacattataattatttttattccttattattgaagactaatattataagatttacaacaattttactcaaatataactgagctagacccataataaattataactattggtataagttatggtggtgttatcatttatcaccacatgattgatgttattagttatcactaaattattaggaaattatagccatgtatttttttcaatttaataaatattatatgtgaagtaaatttagtactaatattattaattaatattcaaatatttattttaataatatttatatattaatataatgtttataatttaaaatatcattttcctaaatccatacgtgttttagtaggttttattgtaattggtttgtctagaaatatggatatccatatttgtcaccctcgaacatttcttgacatggtccgtggtctcgcttctatttgtctagatccaagctggctcaagtgcttgaagagcatatctttcgaaacaaatatgattccctcgtaagcattaatatctatggtttgattgttaagcgaaattgaatagatatattagtcaatgaagttaattaaatataaacttatggcttaaatatctcttcatttccggtatatatatatatattgcttttatggttttagtcgttaaaaaattgtttttttcaaaatgatttctatggaatttctttttattgattttgttccttgttatttttctttagttcttgtaatatatatatattttattttgcattttgaattagtctctttaaaagttatttgatagtgactaaaaacaaataatatagattttacaagaactataacaaaattacaaggacaaaaacaaaaaagaaaaagaattttacaagcgtcatttaaaaaaaaaacataagaaccaaaatatttaaacaaaaaaaaagcaatatgttagaagaatcaaaaacattttttgtctaaatttatttatttataatttacctacatttctataacatttatttcctgtaatataaatttattatgtttaattttacatttattcctcgcaacaatatttccttttattaacccttgtagtttaaatttaggtcctatagttatcattttttatgcttttggtcattgtcgtctaaaattacaacttaatgttgtttggaatgaacattaattaaatgggtcttgttatgttgatttcaaatggcattagtcgatatttgacagattaaaatgaaaaaaaattataactataaagacaaaatgagatattttaaattagagactattttttcattgtaactataaaaacatattagtaatgaaattattttattatttagaatttctcataaattacatttaaatttataattaagttgaaattattaattaatgtatatattaagttttgttattgttattttaaaatataatgattatgttgaacattacttaatcattttactatgtcaaaaaatattgaatcattttggaaatagtgtgtacattatttgtaataagaggttctttatattagcggataaattcagagcaaaccttaagtattaaattaagagggaggctctccaaatgtcaaactttgtcaaacagagttctataatgattaatgaaggcgtctattaaaaaagaaaagaaaaaaaaaaaaggcttctgtcacaattcccataatgcaaatccacaattgaaagtcaccaaagttgcacaactatcctaaggattaaactcttaacacttaacagggcttcaccagcttggtgaaacatcgcatccatatcatccctttgatcttccattatatctagctcaggcaataatatgatcttgtttattttggaacagggacgtgtaagtccgactcttctttgagttataatcgcaaattgcttctggtttgattagccagttaaggtctttgattttgtcccttccttttttggtataataccgttttggctgaaagttgtaagaccgtgttttcttgcggattttagtgttcttggggttttctcctgttttcacaaaaaaaaaaatattgcatctgatttagcctattttaatttttttggggggaattatttatcttaaaaaaatagagacaattgctttagaataaacatacaaaacatgcaagagaaaaacattaatatctcgaaaagcttaattacagtgtaaaccaaaaaactaaaaaacatacaacacaccagaaaacaagtttcaattatttagatagttgaccaagtgtgatcatggggagtggatccatagaagatgattttggcatcacaaactcgttatgcacttgttccatacttgggcgaaagcgtggattctcacttaagcaagcaaatgttaattttgcaatcaagatcacttcttcaacaattggcttcactggctgaggtagtcgctggtccaacacatgaattaatagcatattagacgaagatgatgaaaacaatgaagaaatgagatctcctggatgcattcccattattatttccaaacaaagcactccgaaactgaagacatcacatttctcattcacttccatagtataagcaagctctgtaattcatcaaaataataacaaaatagtattataaaacaagtagcaggacttattattgaaacaagtatatataggattaaattcttaagaacaaaaatggcctaacctggtgcagaatatccatatgtgcctgcaaacgctgttatattttgtgaatcaggattcagaattttagctgttccgaagtcagagatgcgggcttcataatccaaatctataagaacattcttgcttgatatgtcacggtgaacaataggaggaaagcaaccatgatgcatatggtacaaagcacttgccacacctttaacaaccttcaccctcctttcccaatcaaacattgttgcacgcgtatcatcggttagtactttatccaagctaccaccctctatgaactcataaaccaaaaaggagaagcgtggatgtaaacaatatccaagtgacttcacaatgttacggtgcttgatttcggccaaggctttaacctcagttgaaaaagcctttgaatcggttgtttcctcgttgggtgcagcatgaagttttttcacagcaacaatctgtcccgagggtaattttgccttatagacagatgcagttcccccttctccaatgagatatttgtcatcaaacccctctgtggctttaatgatatctccatacactatttttccatcataactccaaagggaataatgatccttggtttgatcttctttatccttctcctttttggcttttgttgctcttcggtagcaaatacaaaacgaaattccaaccatcaataataatagaaatagagcgccgaaagaaaggagtaatgccagcatgatgacatttcttttcattttatgatgaggtagggggtggcaaggcaccaaaccggaggcatttccacacaagcctttattatttttcaatgcatcaaatgaagcattaagaaaggctggaatgctaggaattaaaccctccaattggttgttagatatgtcaacattttgcaagctattcttaaaatcaggaatggctccagagagattgttgtgtgagaggtttagtgtttccaatctttgcaaagttgcaagttctgctggtatttttccattgaacaaattcctactaaggtcaagatcttgaagagattgcaattggttaaacgaaggaatgctttctgtgaatttgttgttgctcaagttcaagtgaactagtttgagtaaagatcccacctgttttggaattgggccacctaaattatttgctgcaagctccaaattttcgaggcgggacaaagcacctatttcagtaggaatgttcccaaaaagttcattgtcgcctattgatagatcaaacaaagaggtcaagttcccaagttcttttggaatatttcctgttagatgatttgaagacaagacaagttcctctaacatgggtgcccagcctagttctggtggtataccaccagataaattgttgttggatatcctaaggcttgtgagactaggacaccttgcccagtctggtgaaatgtggccataaaaattattgctactcagctcaacgaagtataactctggatacacaccaaaagcatctgagatatttccgctcaagcgatttcctgataggtttactctggtaagactcgagcaatttttcaggctttttggaactggaccggtgaaagaattaccattagcagcaaattttctcagtgacccatctatgcaaatttgttgtggcaaaggaccggtaaaacgatttgtagatagttgtaagctttggagtttggtaaagttattcagtgctggtggtaatgtaccatgaagtttgttattaaacactagtaaaaaattgagctttgtcaaatttccaagggaagaaggaataactccggaaacagtattcctagacaggtccagcgactctagattgatcaagtttccaatggaggtgggaacggatccagagatcatgttatcggataagaataccatgccgagctttgtcaagtttccaatatttgaaggaattgatcctgaaattctattactttcaaaatcaagaactttcaaattcaccaactctcctatgtagggtgggatggtaccagagagactattgtttgcgagcttaaggtgttctaaatttgtcaagtttctaattgatggaatggtaccagaaagtttattgcctgttaagtctagcaaagacaagctggccaacttcatcatggaaatggggatcgaaccatgaaaaagattagcatccattttcaactgagaaactctagacaagttagaaatttgctgaggaatgattccattaaaactgttgttactaatatccagagttagcagcttgggaaaagatgaaaatttgagactgtgaagagtaccttttagcccaagatttgccacatttatagcggtcacatagttggattcgtcacaaacgattcctttccacgtgcaaggacttacagcactggaccatgatgacaaagaagcttggctttggttgtcaagactcactctccactcaagtagagcagctgcttc
